United States Patent Application Publication US 2026/0191916 A1 - sequence listing, part 104

SEQ ID NO: 656 - DNA, 842540 bp, Agathobacter rectalis
  source 1..842540: mol_type = genomic DNA
gccatctgttccgatataccaccagccattactgttcctctgtactgtctcctgacctttctgtacctttccacctatgaaataataccagccctgtggtgtatttaatacgtcataagcattaaagtttaccttgccattctgacaataccagtctccatttgcatttgaagcaattccattataattaaaatcaactttgccattgcggattacccaccagccattactattttcaagaacatcattgcatttagtatctatctctccatccttgaaatagtaccatgcaccatctgttccttctaatacacctgttttttcttttccaattggggatatcttgtccggggtgttaggtacatttggcgtgtttggtacatctggagtgtcaggcacatccggcgtatccggaatatctggagtgtcaggcacatccggtgtatcaatcacatccgtacagtttgttgtaaatgccttgatacataaattcccatcatcaccattcggatatgtaatattatagaactttgttccatatttataaaaacttctggaattctccctgtttacctcacagtcccatattacggtatcacctctcgcctccttatatgctgattcatgatccaaagctgccttatcgagtgtgacaaccactgaaaatgagctgcccggctttaaattgacggtctcattgagtggtatggtatagaaacctgcaaatgcactcgttccttctgttgtagcagactcctgcaaggtaccgcttgttggatcctttaagttcgtcaaatctgtatatacctgtattttataaccaacattagattcccttgtcatagaaagcgaaacagccttaagcttttcatacgtcacgccttccttttctcctactgtaaatacattggccattgtcgtgtaattagagactttataagtatttataccgccgtccagctgataattattatcatagttgtcagaacctgtcacatcaaagacccacgctgtatcagcaagagacactgtatcgtatgacatccagaaataatccttatagtctccccagctatttctcacaagccatgcaccattgtttgccggtctgtttgtctccctgaaattatctttggagaagttatcatcccaaccaactatcatgacagcatgtccaccgccaactctgtcagcatcataataagtatatgcgtcatctccataaaaaccccatccggcattcctgtcgtagtacatagccccgactgcaccatgctcccttatcatctctttcacctgctgtggctgttgttttatatttatctcataagcattctgcagatgtgcgcggtcatacccatatgcatatttactatctattgaagcatttgtatcattcttgaaaatcgaatacggcacatctgattcgttcaccagacctatccactggctatagcgacgcaatgcatactcaaaattaccacctctgttctgatatatggtagaagcaagcttattattatactttgccttgtccccttctgttccacccaagggatctgtaacaaaattgtatgcaaagtacgccagctgtgcctcactgaaatcaacagtatccttgtctgccaaaccatcattaatcatatcaaactcagcaagtcctgttgatgaaaatgcccagcacgtaccatatggattttgatcacgatttgctggatagtctgcccttatatcagctatcccattctccggatatgctgtaggtactgacatatacaggctctcatctggctcatatagcggggtattattgtccagctcgctctcaatatatccattagcagtttccgatgtggtagtgttgtccgcccatactgttactgtacttggtgctgtaaccactgtcactgcagctatcagtacaattaatttctttctattcatctgatattcctttcttaaacactcttaacgtacttcatttgtaaacgtcaaaccatgcgccagtcattaaaatcaacgccgcccattattggcgacgtggcttcctgcattcgtccggaagactatctgaccatggcatgagatagtccagcttttctggatctatattttctttttcttcacagagttttggcagttctgtgaggatatatttaaaataataatacggccgcagattattcagcttggctgtttctgaaatactgtataccatcgcactggcagatgctcctttggctgtattgtggaacatccagtttttcttgccgaggcaaaaggtgcgtatggctctctccgaggcagaattatcgatagggacatctccatcttcaagaaataccttaagatatttttcctgattgattatgaaattcagcccctggcctgttttggattttggaggtaccgcacagtcgttaacctgttgttttacccacgcaaaaaattcctcaaccagcggccggatcaattcctgccgtttttgaagccgttcctctgatgagagcccttttaactcagtgtcagcattataaaacccggctatcttctgcaatgcctgataggcaacagactgccttacagaagacggatcctttttatcggcagccttaaccgcatccgcaaaatcacgccttgcatgcgcccagcagtttgcgtttgtcacatctggaagctttttatcaactagatgatattgctgcaggctgtccgttacaaggattcctttgtaatccttgtaaaaatccagaggcttttgatgatcacgtcctttttggtactcatatatcacaatcgggcgtcgggtataaaactctccggaacggtgcacccacatatagcacttgctgtttgggtggtcgctgtctgctattacttgagtcggtgtttcatctgactgtgtgacatgcagtgacagcagctcctgcttcatccgttcaacaaacggagtgaagtacatctgggagcatctgacaatccagttggacattgtctggcgtgatatatttacgccattacgttgaaactcctgctcaatccggtgtaatgctgatgaattcacatattttacattaagtattgatgccagtaatgatggcgtcactatactgttgcgaagcaagtccttgggtctgtttccacgaaggaactcatcctgatgatcaccatcagttcccacatacacctcgacagtatgaatttcgacagtccatgcttcgggctcatgacgaagcctcttgtaggtttcatccggcatacggcgccaattgccttttccataaaaagcatccagctgttcttcagaaacactgtatggcggaagtatttcttccgggaaatctttcaggtcgatattccgctgcccttttttctttgtacgcttggcagtaatgacctcttcagcagaaggctccctggaagattcatcataggcggcgtccgcttcgtcaaaaaacgaaagctggccttcgattgattttaagctctctgtatgcctgccaaatctataattattggcaatgcggacctgctcaatgagtttttcgatgttatcatttaaagcatcgagctgtccctgcatcataagaacaatggtaatcagttcttcgcggctgcaattattcagttcttccaatgtatgtttctgtgccattgcttcactcccttaaactgttttcattataacagaagcagctttaattagcgaattcttgtgtgttagctctccgtcattatgcctatcgctataaggctataggatgctgataaacgcagggaaatatagagctttcaaatttcaagatatttgtttcaagtaacagctaaccattgtaccagttgtgaaaaaggcatataaaccaggttcaactatagattttttgacgtcataaatgtctttgaaaaatctctgttttgcacaaactcagaagggattttgtggtgttacatccttgattttaggatcgagcggatttaaaccgagcatcaggtaatcgaattgctcttcggtaagatccgcagcgtcttccgtggttcttggccaggatagtgaaccggattcaatccgtttatacagcaaaagaaatccatcgcccatccaaagcagtcctttaatcctgtcggaacgtctaccgcagaacaggaacaaggttcctttctcaaaaggattctgcttatatttgtcaccaatgatcatcgagagaccatcaatgcctttgcgcagatccactgtaccacacgcaagcacaacccgattgattttagcaacgttctccagcatggactacctcctttaagagcctgcttagcacagcatctgaaacatcgtttgatatttcgagaatgatatcaccattcctgacaactgcagtcgcgttagaagctgacgaaaattcccgtgtttgaatagttttctctgatgtaacaggggcagctatttcaacaaaagaaatttcggcaggattttcggttgttacaggcagctgcatctggtcgtatgattctttacgaaacttgcgcagccagtaataataagatttttccttgatatcattgtctttcagccattgatggacagttacgtttgcaggtcgttcctgacattgatttatgatatttaaccagttagcacgccttacatcgtgagtacatttatccatgatagtttgcctcctctaaaaaactattagttttttcgtgtcttatagagtgtctcacaaaaatgctaattatccaaggcgcgtggtttgacgtttaccttcatttatcaatagtaataatttactattattatatcataaaaaaatcgcatgtaaaccaaaaaaatacgatttacatgcgattctatttattttcccttgataagctatttcacctgtccatttactatattgtatgtctttccttattgcgcaggatatagattgttattgcaacaaccataagtgccgtaagaaccgccgatgaataaacaaaataacctccctgaagtataccagccaggttgacaacattggtgtctgcccccccactgtggaagacatccacaaaacaagaattgccaattatatttttataaaaaacctaatccgcagctttgcatttcaagaattatacagaaaagaactccacctataatgtttcttcactatgtttctattcctttattatccattcaatgaagtctctaactgctccatctccaccgttatggagggcaacaaaatccgaaatctcttttaccctctcaaccgcatcggcagggcagccaactactccgccggcctctttcacagggatcatacaggaaagatcgttgatatcatctccgatatacgcaacctgagacaaatcatctgcaatgctattaagctgttcaattttattcttgattccctggtatacttgctgtattccaagctctccgcagcgtttttttacgatttccgacgttctacctgtaataattaccggaataatgccacctggaatggcaatatcatgtattccacagccatccttaatattaaacgccttcatcatttcgccatgggcacccatgtatatctttccatctgttaaagtgccatctacatccattactaaatatttaatcatcatccttcaccgccagtcaatatttactcaaaaattttttcgcgctctcatttggaatcacttttattgctaattgcaacaactgtagtcctatcactagaactagaacttttccgcaaaaagagaaaagccaattatgtactctgaatatctgaagtaccctcactgatataaagtcactaaaataatcaaaggacatcaagaacaaggtgtgtcttcctaaataagtaagtgccttcgcagatgcagtagatgaaccgactatgtttgcaaaaaacattaaaagaaacgaagccgagactgaacccataatcatcagtataaatgatccatagttattagcactaaattcaacaatttctactggattgagaataattccaatggtagcagaaaacaatattattatacaaacaaaaatctgaactccgcacccttgatactttagcttgttcaaaatatccatcttattaatctgaaagccaatctcaataaacaaaacagccatcattgcggttccaaagttccatgggagacgtggcacgtccagaacatccaagatatagcttattccacttaaaaccaaacatatgattatacgcttgctgttagactgtgttattagatgaattgagcgcaacatacagctagcacaaaataaacaagttaaaaaccataatggcgaacaattaggcatccactctgtagatccataggaataaagaatcccgcacagatatttattgaacggaaacattccggcgcgaaagcatattgatattaacgcttctatcaaaaagtttactccacacaaaataaaataaggaacaatatacctctggaaatatgctttaatccattgggaaagttttttatcatagcaatctttaaataaaaatccagaaataataaaaaatagcgccatatgaaagccataaattattttcttaaacggtggatttacatggcccaatacaacaagtaaaattgcaattccacgtagtccatctacccatgctatgcgctctgctctgcaagattatattgtttttcattgccccgtcaccccctattaacacaatatttgataaaaagaaagcattgttgcccgattataatatcatactctgtttttttgcaagacctttttgcataaagttgcaaaaactttttttaggtcgttgcacctacattttgtaggtaattgcaaagcctcctgtcagatataaaatctgacagaaataaacttatcatatttattacgttcaatattctctatggttcagaaacacttacgcattttcctcatattttgaaggcgtaataaattccaccctaattccagatttttttactcgttgaatcaagtttttataataatgatttctacgctcaacctgttcattatttacaggatgacgcatattgggatcaaaataattctcattaatattcactgaaaaaccatctagtcctgctaataacacttcttttactccacatgctttcaaaagatttaaagcgatgacagctgatgagtcatgcgttcgatctgttacttctatccaatttgcataatttaatatttttacattacctcttccgccttttgacacattagaacaaacgatggtattgagaccatcttttaccgctttatcatatatttcttttcttgtggttaacaagtagtcgttatctaaccgcattgtattaagaccaatggtaattacatcagtagcagatacaagcttgttaattttctcattagcatcaataatactctttccagggccaatcaataatattctttttccagcaaaagctttcgttagttcttcaataacaagtgtatcatcaactgatttactctcattatactgtctgtaaacctcttcagcataatttttatcaaatgaaatctttttttctggagcaatcatttccaacatttctccaacttggtctattggcaacatatgtttattataaaaatgactcgcataacttggtgtacactgatttgcggcggaaagataatactccggtgcatatccccaatagaactcagaatgtaactgattgattaccttatcaattacttccaacaaaggtgcaatatgatagttttttccataatacaggttcagatgctccagtagtaactctgtattcagattgcctgcaccttttcccatccccattatagagcaatctaacattaaatcacgatttgttggaaatttcagcatttctattgcatttgagtatgacatttgtaaattattgtgcgaatgaaaacctagtgtcattgaaggaataagattatgatcaactaaattcaacacacgactcatatcgttaggacgcatttcaccaaaactatctacaatgtagaacccctctgcatctgggagttccttattaataatttcaattagttctagcaattctgcatcactatatctcaatgtaatcattggttgaatgtagaacttgtatcccttctcaataattttacgtccagccttaataatatcaaatctattttttttatgaaatgccatacgtatcccatcaatgccttctgctacgtatgggctcaaattatcaacattaaacttaccataatccatcatggcaacataagatacaccgggtttcttatgttttaaaaagttttcatagatcacacgttcatttatgtattgtgttcgattactcacagaacctttgttttcatcgatatatcccaattcaataatatcaacgccagaagcctcttgtgctactagaattttatccatatacgtctgcccgaagttaaaatcattcacgcaaccgccatcacgtaatgtgacatctaatactttcaaattattcataatattactacctctttcatctataaattgatattcaccaatgcttctgcaatgtcaaaatcttctggattatctatatccacagtttctttaaatccgacacatttgataaatggattagctccaattcttcgaccatatttaaggaatacctccttagtaaatacatatactccagatgtttcttgataaataggttccaaatcttgagtcctaggtaaattagatgcatcaaaatttagtggttttccatttttccacaaaaaagtctgtatcttctctgcacagaatgctgaatcatacattccactctttactgattcaatacattctatcattgtttccgtagtgataaatggagccgttgcatgtgcataaacataaatatcagcatccttttctttaataaatgatgtaaatatttgactaaagtttgaagtaggcaaatccaactcctgcggtctttttaaaaactttactccttctggaagaaatggaacaatttcttcagagctacaataaacgttaatttcatcgcaaagtcctgttgcaacaagattattcaattcgtgttgcaataatggtttatttccaagtatccgtgtgtttttccctgggcaacgttcatttttcaattttattggcattattgctattatcttcatgtatcaaaaatttcctttcctattctgtcaagcctaaatctattgattttactggctttgacgatttttatttaccttccaggaagtatatattcctgaacagcttcatctgagcaataaacatcgacttcatcaattgtctttgcatctaaacatgcacgctgaataaaatgcatgagtggtgttccatcaaagaacggtttaatattctttcccggaactcttttgcttcccaacttgatagggattaaagctactgtcttcataattacattctccttttccaattagtattattctatttaccttttaagtaatttccttcccacgctaagaatgcttttcctatagataaaaagcattacaacaaaaagtaatccagtaatcaaataattgtgaatccacacttcgcatgctgcctgaatacataacacgacccaggaagtcataatccatttatatttagctgataccacggcatcccctgtggctctcttccggataatatagattatatagcttgcaattactgttgctatcgttgcgccttgaattcccatcaaataaaccaacgcgatattaagtaccacattaaccccggctcccccaaaagcggcgatagccattgatttcgaatctttttttgccgccaaaattggtcctatatatccagatgcagcattcagcattgaactgactaataggaacggcacaaagacccaagcttggtaaaaatcttttgcaaaaaggatatgtgctataggtcttgtcaaccatatcaatcctgcacaccccacacacattaacgcatttaaatataaaaatgtttctctataaaacctttttgcttcttcagaaccatattctttaattgctgatacctgccaagcttgtataaaaatgccctgtagtgtatttaaaatagtaggaatcttgtaggcaattgataagagtccattcgcagcaactccgcatataaaagtaacaacgtatttatctgacgcagtgttaacccaccatccaatagtagtcatcatcaacggaactgcatatagaagcatttctttttgaagtgttttatcaataacagttccaatatacttccagattttcactcttactgcaagataaactgctggtatggcctgtccaagaatactcgctgaaaaaaagcctggaagaccaagtttccaaaccagaaggaaaagtacattggaaagaatagttactattgttccaatgactcctgcaacccccatatcttttattctttccagaccttttgaaaactgtatcatcagctggttaagcacataaaagatataataaaaaagaatgaattgttctacaccatataaatcattccaaacatgaaaagtacggttaatatataacagtaccgtcatgataaacatcccgacaaatataaatctcagtgcaattgatattatttttgtatgatccgcccctttttccattgaaaaacgcattacaccatctacaatgtttacagttaaaacagggtacaggagtaatacggttgacattgccaaatcatatgtgccgtattccgcagtagacagaacacttgtgtaaatcggtacgaggaagaaaactagcaatttagaagaaaagttacttatagccaatattccggtgtttttaattaagtatttatatttactgttcattaatattctccttattttgacttttctatttataaaatttcagacaaatcagaagctatttttattctgtctcttttttttggaatttgatttatgaatttcataagcttatcaatgttcttcgctgaaacctgtgccttgggattcttgtctaaatcgcataaaggaaacaaaaaatacgttcgtggcatatcactaataatcatatttaccccaagaacactccctgaatttaccgtcaaaaatatatgttgactaaagtcctgtttaaattgaacaacctcccaagggatctgtgaatttaaatctacgtttaaaccacattctataaatctctgaggattatcacgcggatggacttttactataagattttcattttttactttttctgcaatttttttaaccaaatcaagttctccaattggttcaccaccctcaaaatcataaacgctggaaaagtatatatatttttgtttataacaacttgaaacattattcacagcgaaaagtgacaaaaactgtgtgacagacgaatcattaatgctttctattggagggattataagtgttccaagttttccttcataaaccgctggtgtaaaacaataaaaatgtaaaatctgttcaagcaaatttcgtttatgcaataattttctaagcaacctagcaattttcattttgtcagaggatggaaaactattgttatatgataatattccttcttcaaatctttcacatatcaaatccggattattcttggacatcattgaatagagaatatatgtaacctcgtctatattgtaaaacagcattttatcataccttatattacaaatatccttaaaattctttaatccaaatgtcatattcattacttcgttaattctttttgcagcggaattctttttttgcacaatgtatttggtttttttgaaaaatacattattaaatatacccaaagccttaacccttgaaggtatctctttgttatatccgcatcgatctgatattactacatcaacaatatcattaacgaatattgtatttttcatacgaatcgcaacaaatatttgaaaataagtattacatatcattagaactttcatagtcttcctcattttataatctataaacatctttcactttgaattgataaacttccttcttccgtttaaaatcatccaaattttagggctaaacgtcatcaaaatttttgcaagtagttctgctacaagtatcgttaaaacggctcccgttatagtgtttataagcgccgcagcatatccagttaaaggaactgttacgctaaataatttattgataatcaactgtggggtttcatgaaaggaatagataaaaaaataaatctccatccatccataaactttaaggtgtttaaaataatccagacagttccaaaacaaaaaacaagcaataagattctcgatcattaacacatactctgggatagtctcgtaagaaacagtaataataaccgtaagaacaattaagctcagagggtatgccaacttaggtaatgtattcaagttatctctaatcttcatcagtttaggatcttcataattcctggaataaaatcctcccagtaaataacataccaacccttctatgctaaaaaatcccactttagtatcaatcgtacaaatcgccaacagtaacaatatgacggtaacatacaattttctgttttcaactattctttgaattagcttacagaaaatagtcagtataattagctgaaacaaataccagtattgcccgttatactgatataatgtaattcctttaagaattgaaactgttttcccgtcccagacaaaaacagcagatttactgaaaatatttaaaggaattaaagctaacattacagcaaataacgtccaaatagtattccaagcgaaataaggaattacaagtgacctcattttggttgaaattatatgctggatatcctctttttgtgccttctgcatcataaagtatccgctccaaaaaaagaaaaatggcatgctgaatgagaacaaaccttcatgcagatattctataacccctccccagatccctacatcataaaatacatcacctactgaatgatggagtactattacaatgcaggatataaacattccatatgaaatcttcacgcttgtttctttgctcatttccttacctccaatgctggaatccccacaagtgttgcgcctttgttataacaagattttacaacaactgcattggcaccaattttaactccatctgctatataaatatcgcctattatttttgctccaacgcctatctcaacattatccccaagtctaggagcagcttcatcaagtactcctttattaccaacacaattattcccgtgaaattgacagttctttccaatttttgcatggccgttcacaattacggaaccgtaatgccaaaatcttcccactaaatcgctggcattatagtggtactcacaaattcttaaagctcgaacaaatttccacaacatgtaatcatgatcatatagcaaagtttttttaacttgagtttttatgtcatttccaagataaagtactttctctgtttcaagccacttatatagtgtggttttgtcacatattctgctttttaataaattgtctttcatttcaactctttgctcccattatgttttctactttacacaggattataaacagtgaatcagataagcctccgacaatgctacggatttttgtcacacgtcgtatcttcgatttaatagtacgtgccatcgactttttaagttgctcctttatgaatttttgctcatccttgtagtcatttctctgattgagcattattcttttatataactttacgtaaatcgtgtttctgaattctaacaccgcatcatctaaatctggataataatctaaaattacactactaacaaattcatacaaagaaaacactgaaaagtctttctttttaactctagaacgtgatattgaatctggatttgaaaaatagtaatatgttttttttgtgccttgagctatgcttccagcttcaattattaaaaaataaatcagtgctaggtcttcattcaaaatccctaccggaaatttatacatcgagttttcaactggattaaattcatagtattcttttctggaaaaaaatttagaaaaatttatcgttggtttatttctaaacaaatctaatgaatataattttccacatgcaatatgtgcaatattctctctataaagcatcttgttaacagcttctctagccgtaagtttttgatcgatatattcttcattggtcttaatttcatcttctgatgagattatttgataaaaagaagaagctacttttactttatatttttctataagtgaatatagatactctatataatcgtaagaaacgaagtcatcactgtcgatgaacgtaatgtaatcaccggtagcggcattaattcctacattccgtgcttcagacaatcctccattattcttatctattactataattctagaatccattttagagaatttatctattatttttcgtgaattgtcagtagacccatcatttactataattatttccaatttacgataggtttgatttataatactatttaagcaacgatcgatatatttttccacattataaactggtacaactacactaattagacacttcatcaatattgtaacctcctaattttttcctgttaattaatcttgtagcaaataggattgcgggcgcaaaatacaatatggctatgatcggatagttcaaaccataccaagcagtcctaaaaattgttatacaaagggcagcgtataccataaatctgtattttgttgtttttcttacaagtctggcaagaagtaaaatatatgctccagaaaaaaagatagcgaacttcaacccgaaatttgcaattggttcagcgaaaaacagtcctcctcctgctgtcggataaaaattttgaatataagattcaaatgaataaggggcatttaaaaatgggacacaatttacagcataacttaaaaaagttatgccatgaaaaagctctcctttcgttgccaaatctactgcacaattaaaaacatatgaaacatcgcaagccgtggattggatcaaagcgccattcaatactttttttaattgtagattatccgcacctgttctgagcattcctaccgcgacaaatagaacaactacacaaccggctattactcctatcttcataattgtgtttttattattcctgttattgttataatatttaattgcaagaaaagccaatagtcccatgcaatcgactctttctccatgaaaaacataccagaacacaataataactgtcacgaatatagcgcattttcggcatctttcattcattattgctattgccataaagaatggaggcatgcatgaccaacctgtaaatggtaatattcctcttgtaaatctatttgtcaatacaaatgcgcctaaagacggaattgtcggaaacattaaaaaagttattccaactgctgctataatcaataaaaccgagatctgaaatccagcatctacgttcaatgtgaacaatttaccctcgttctctaagcagtttgaaatggataaaacgcaataaagaatgagattaaatgaaaagacacatataaacatttcataaaagtatattggaacctgtttgaaagccaacaagccataaacatcccaccccacatatgccccatattcctgtatcaagcaaaaatttagtaagaaagccaaaatactaaaaagtgaaattttggctttcttaaatatcataattgtctgaatcaatgctatcgctagacatacagtgggatcatttataaataatacgcccaagccgcaaaacaaagtacatattattataataaaatcatgcttttttactaacatccgttataacctttccgcggctcaacgcttgacagtaatacctatcaagcatttttgctttttctttaatatcatatttttctttcagtgcagtaatatcaatgtttctattttttgtactgcactcaagagtttttttcgcccaattctcatctgtttcatccaaaggcataaactctatcagctctgtaagcttacatgtcggagcaaccgtatcactgaatagcgctggtattcttgctgcctgtacttcgacggaaacaactggaaatccttcatatctggaaggcaaaacgaaaacatcaataagactataaacttctctcatgtttttcgtcgtaccataaaatatcactttatcctgtatgttaagactttgtactaattcttttatctgctcttcaagttctcctgttccaacaagcagaaggactgcatctgctctccttttacttatctcgctaaatatatggattagtttttcatgatttttctgatatgaaaaccttccaacgtgtccaataattaattgatcttgaagtttatgctgctcacgaatcttttctctgacttcaggatctatgtcataatagtcaagattgattgcattctctacgagcaaaacttttcccttttgcatccgtctttttccgtacaagtatatccccgcttcttgtccacaggtcataagatctgttgcggcgtgtacgcacaaaaacttacaaatagcggccatgattctaaacagaatatttctatttgtttctgctatgtgggaatgagaaatcctcactttaactccaaggagatacgccggtaataatgcgcaaaaatttaccaaattcatatgcgcatgtacaatatcaggtctttccttttttatcactctgtatccatcaatcagattttttatgaaattttcactccgcgccgtaattctaatcgttcgacatccggattcctcaattttttctttgcaggtctcaactgcctggtgttgatatgcaagaacaaattcatatgcatccttattcattgcaccgcaataattacaaagcatttgttctacaccgccagaagttaatccagcaacaaaatgcattaccttaatctttttcatctctttaaccgccatatttctgatatattgtgttctccggactaaaaaacgatcttatgctttcattcatttttgcttctaatcttgactatgaacggtctcccatacgcctgcaacaccccggaaacaccaatcatgatctttctaggcatgtgtttaataagtgtaatgtagactcctctcagtcctgtggccttcttatacttccgcaagttttcatctttccatggactcatctttttatacttcatccactcacctacgtacttatgcctgcatccctcaacccacggtctcctgcttaagaagcttgtagtaaaatggatgattgccggagactcagttgctcttttaatctgctctctaccgtagaacttcggcggtttccggtaaaccatcatctcgtcatatgagaagtcgtagtagattgtaacggaattaaaccttggctcgaagcaatatgtatcatgagacagaactgcatttaatgctccctggtctccctgctgaatctttccatgtttatgggcaataaatttcatcagcctatcctctacttttttccctttccatttatccaggtctatgagcattacgccggagttgaacatgatgtcatccggtttgagatcaatatttgcacggtactgtctgctgaaagcatccatcaatgccccgacagcttttccctgcaagtcaagattccaaagctcccggatagatgtattaatgaggatgtcgcaatccagatacaaaaccctgtgtaaatcagccggaacgtctctgctgataaatagtctcgcgtattggcttaaagaacctctgtcaacagcaacatccattgacagttcctggcttacattcattgctttaatccacaccggcaaagatctgttgtaggtcttacatatagattccaatttcttcttgttggtatctgtaatgcctgagtccaaaacataaactgcgatgaactccatatccttactgttctcataaagagagaccatggacacacctaagatttcagcaaacccatcgtctgaagcatacacaatgtgagcttcgttagggttgtaggaaactgttgtgttaggcttctgctcctgtaatgctcccatcatgccaccgcctttccggtgacataagtagtttcaacagagcttactctcgaaatgtaagcgacatgccccctttttgaaaaggtgtactcataatcagctcccggagcaaaacaaacaacaagcacattggcaaggtcaacgatataagtaaaagcgcctccgcccatagcttcgactatgtacagtattttctttttctccgccataggtttcttcctccactggttcattcaaattttttatctatgtacacacccacatggatggtatctttcatctactgtgttcatcacacagctttatcccgctatttccgcgtttattcgtcttatttctctgcatctcatcatccagacaggttcactcaacaaaatcagtcgagcttttccttacattgctccatcatttctaaatactcccacagcagtcttacaaagaatactaatatcccccttaacactccactccccaatatactgggtatccagcttcaccacttcctcaaagtccgtgatattgctccttccactcacctgccacagtccggtcagtcccggtctgaatgacattctggctctgtggtgtggttcatacttctcccactcatcaagtgtcggtggtctggttcctaccaggctcatatctcctgctagtatattgaagaattgtgggaattcatccaggcttgttttcctgataaactgcccgattccggttttcttctttccgtttggcagcaccttattgcctatgattctcgggtcgaagtccatcttgaacatcattccgtcgcctatcttgttttgtgccataagttctttttttcgctcctcggcatccatatacatgctgcggaatttatacatcttgaactttctgccgtttctgcctattctctcctgcgagaagaatatcggtccaggcgaggctatgtatatcgccggtcccacaaatatcatgatgattagtgtgaacaggcagcccaccagacctccgactatatccatgcccctctttaccagaagtgcgctggtatttgcatagttcacgcttgatgtgactacggtatagtcgcctatcttttctatctgcttgtagcctccctgggctgtgccatttttggttattcctgtatgtaccactattcccatctcaaggaatatatctgccatccgctctggatattcatcctcgctacaaggcgggatgagcacctcatccacccactcatcacacgcatagtccactataccatcgtggtttgcaactataggtatgccacatatagtcatacccttcatgtctgtatccagtgaagctgctactatctttgtatagcctatacagcttttctccactgtgcacagtgtatcacgaagcatggcatcaggtgctatgacaaacagcgattttcttgatgctccaaagccctttttcttaaggaagctcttgagcgctagtcttgctacatatgttattgtcacatagattggaaacatgatataaaatgataatcgcgagtatatatcagccatctgtgtggtgaacagaaacagtgctgtcaccagaaaaacaagcattgcatgcttacaggtcgatataaattcatccagatatccgcgttttaggacgttcttgaatgaatctgccattatctccacaaagaaatctatcagaagaaatgctacccccagtatacggtagtccttatccacatatgggttattaaagccgaagcgtatcacatatgaaataaaaaatgctataacaatgcatgcgatatctataagcataaagtctatatgctttgtccatcctctgcctttctttctgtacattctttccaaattctccttgtggtatcttttattttcctctatacctgctacaggggagacaccttagtacccccccccgaattattttaacctgttttgttttacgtatgttttattaggttatttgtatctttttctgtatctaatcagggtattcaataatatattttcacccatttttaattctttgtcaatgaatattaggttttctttataattttttgacactatttctaaatttttcttctccctctctacatgattatgcacttttacactctgtctgctaaattttctaaactgaaatattctttttaacattcccctcttcatcataacaattcttatttgttcccgcaaaaccatcaattaaagctaataatatttgtggctcatttgcaaagactgtcatccaaacagaataaaagccatcccccaaagcagtcataataatttgcttttttaaatcttctctatagctatctggcgcatctttcatatgtagccatccgtccaatgactcctttgctttataataagcagtatttctttctataagccgcctatctttatcccctttactcaaatcaggaacattaccaagttttactagctcatacgtattggttgccttttcttttaactcacctgtcggatctaattccattaaaagctgctcatttacctttggataaccattttcatataagtaagcaattgctgtattattcacatcaggccataaaaaatcatcatcattttcaggagttgtgttagctgattttctagcattacaatatttacatcccaacagcaagttcttccaatccgttatatctccgccctttgattttgatacaacatgttcaacctccggtacatgcttaattggaaattcacaatatgaacaataataacctatcttttcgcctaaatatggcagtgcatcctgatatttttttattgtattatatggtgattcacctttatctactggtctcatttttcttcactttccatgcctgttcagtgtatttttgatgaacccacgccatataagcaggattatcactatattccgcctctaaatcagccaattctttgccaagccttgctatatcatcttgagtcttggcctctttcaaggctgtataatattttgaggctgcttcgtatatctttcgttttctctcactatattgaggcaattctacacccataacatcttcagctatatcttccaatccttctccggaatactcactatctaatggctgatccaaagtaataagctctccctcatccaaagattgaataataaaaggagaatgcgtagcacatataaactgtattctaggaaattgttctttcagaattcctataatacgtttctgccatgtaggatgcaaactcaaatcaatttcatctattataacaattccaggtgtcattttgagtgcatcaccctttagataaggattcaatatgcacattcgcgtagctatatcaagtattatctttattacatttctataaccatcactcaacagctgaaacggaaggattgttccatctgctgtttttaatgcaataatatcatcctcatatttggtcgaagatataatttcttctcccggcttcaattcatcacaaaatgcatcattaacagcctttaaaattgcctcatatgcaggaaataattttcccccattttcttctagtgaaacagctttaagagtatcaatataacgaaatgcaatttcaagtccatgttgcgaatccaaacaatgattatatgcgtcagtcctactaaatacaccttttatatttgttttcttatttccatctttcaaaagacgtgctgtactcaaataaagcactaatggaagaaccactttactatccgagtgattcgcattagatattttattttcccattcaattacagctggctgcatcggattagaaccaccaaatttagttcttgcatcttcttttaaaataactcgtctaaattcaatattgttctctgtgttatttccgccccactgcgccttgcaacttacttcacacggatactgtgcaattgatcctgtcgtcaaaatcatactatcatctgaaatcaacgtttttcttcttgcatcggttgactttatattatatacaaaccgcgaaggtacataagtcttgtaagctgcaagataagctcccagcatcacattggcagcctccaatacggaagtcttaccagaaccatttttaccagcaaaaacattcattcttggattgagcacaaatttttttttatcaaatcttctataatttctaaggcctaactcttgaattttgaactcacacattttatccgctacctttagtccttcctcatttttattaactatatcatttttttattatcacagcaacctttccgtaacactacagaaatttttgatgtataaatgatgtaaacatcattttttatatacttttcaggaaatatctactcctcaaacagcctccgcttcctctctatcatctcatcaatccttgcgatatactgccctacatccttgacattctcgcatctgtcaatgcggtgtgtgccatccggattcggtatgggccagactcgcttggtgcttgctccggcgccgcacgccacgatggtctgcttttcctccatgatcagtatgttgtatacgccggccttgccctttgccgcatagcccacgttttccatgttgcctgccatgcccttctgcctgtagagatagtatggctcaagccccatctgcttacagtaggctgcgcagagatccatatgctcctgggtgttgaccatctgcatatcgctgtagcggtccttgaagatggtgagtattgcagctcgctttactgcgagtgaatggatggtgacgttgtcaggtgccagctccttcaccagctccattgtgtgccttacatcatcgagcgtctcctcgggaagccccatgatgaggtccatgtttatgttgtcaaagcccagctcacgcgcgagcttgaagctttgtatcgtatcgtctactgtgtggtgtcttcctattatatcaagcgtctgctgcttcatggtctgtggatttactgatatacggctgatgccgtttttctttagtgccaggagcttttctctcgtgatggagtccggtctgcctgcctccactgtaaattccagacagtcctttaaatcaaagctgcatttgatttttctgataagcctgtcaagctgcgcagggcttagtgtggtcggtgtgccgcctcctatgtagatggagtttagcttcttgtggtagaatttctgtgccgtgtagtctatctccttctcgagtgcgtcgaggtaatcgtccacgcggtttttccacacaccgagcggatatgaggtaaacgagcagtatgcacaggtgctcgggcagaatggtatgcctatgtacaggctgtagccgttgtcatagtccaccttgtcaagcagtgccttctcacgctttgctatgcctattgagaggtcgattttctcatcacttgcgagataggtttccttcagatagtcgtaggtttccttatcgctcatgccgtcctctatgcatttcatggctatcttggtcggtctgatgcctgagagtgtgccccacggaaggctctttcctgtgcccttttctatcatggaatacagggcgagcttgaggcggtttttggtctccttacggtctgcgctgtctacggatatttttgtgcagattctttttccggctctattcagcgtccactccactgcaatttcatcgcccacatagtctatcttaaatacctgtgaggcatccgcaaattcctttacgccatcgtctgtcatctcgtggtgtgtgcaggctaagtttttcccctccacctcatcaggtgagcaactatagtacatctgcacatcttcctgagggaagaactccttgagcagtgagtgcacatcatattcaaaatccggtttattaaatactactactatcataagtaagggttatacatcctctcgttttctatggttgttgtgtcgttatggcccgggtacacctctgtatgctcaggcagtgtcatgattttttccttcaccgtgcgcacaaggtctgacatgctgccgcccttgaaatccgtacgtccgattgagccgcaaaacagcgaatctcctgtaaagatcacgtcctcatacgggaaataatagcagcagccgcccggtgtatgccccggtgtgtgaagcactactatgtgaaagcctgcgatgtcaagttcctgcttatccttcaaaaatacatctgcataaaaggtctttgactgccccatcatgtagctgacattgagctgcgggtcatcgagtgtggctttgtctgcctcatggatatatatcttgatgccgtagcggtctgcgagcggctttgcatccgtggcgtggtcaaagtgtccgtgtgtgagcagtattgctacaggctttgcgcctgattcgtccacttttttggcgagctgtttagcacacgcgcccgggtctattattatcatttcctttgtctttatattggtgacaaagtagcagttggtctgcaccggtcccactacgaagtggtctatcttcatatttaccatatgagtgtactccttgtctgttatatgttatgcttcacgcaagaaccaccgggatttagccggtggtcctctctacgtctattacactttctatctgtctgagcttctccacgagaacctttatctggtccctgcctttgatattaaaaaatacctcgattgtagcgataccctgcttgctggtcttggactgtataccactgatattgatttccttctcggtaaatatctttgtgatatctacgagcagtcccggcctgtcatgacagaatatctttaagtctgcctgatactcggcaccgttgtccatgagggctgtatcctgccactctgcttctatgagcctgtccttttctatcttggacagattgatgatattcacgcagtctgtcctgtggatggagatgcctcggcctcttgtgacaaagcccacgatttcatctcccggaacaggattgcagcacttcgagaagtgcacagccacgtcatagagtccgtgtaccacaataccgctctttgacttgtgctcgggctgtgtgcctgctgccgcctgctgcttttctgcgatgctgccaagcacatctgcatctgtcaccggcaccacatgatccttcttgtactcatcgtacatcctgttgactatctggctctccttgagtccgccgtggccgacggttgcaaggcatgagttccagtcgtggaaaccgtatttgcggcgtattttctcctgatactcaggcttgtttatctcagcaaagttgatgccctttgccttggcataggctgctatcagatccttgccgtgctgtatattctcctccttgagctcacttctgaaccactggttgatcttgttcttggcctgtgtgctctttacgaccttgagccagtcacggcttggccccttggagttctgcgaggtgattatctctatctggtcaccgtttttgatgacatagtctatcggcaccagcttgccgtttaccttggcaccgaccatcttgttgccgaccgcagagtgtatgctgtaggcaaagtctataggtgtggagccctttggcaggttttttacatcgccggacggtgtgaatgcaaatacattgtcggagaataaatttaaatcactctttaataaagtcataaactccttattatccgacatgtcctgctgccactcgagtatctggcgcagccagctgagcttctcctcctctgtgacagtggtggtagtggcattgccgttatttgcttccttgtacttccagtgcgctgcgataccgtactcagctgtacgatgcatctcataggtacgtatctgtatctcaaacggctgtccgctcgggcctatgagtgtcgtgtgaagcgactggtacatgttctgcttcggcatggcgatatagtccttgaaacggcccggtataggcttatacttctcatgtatgataccaagcactgcgtaacagtccggtatggtatccaccagaattctgatggcaaagaggtcatatatctggtctatcgtcttgtcctgattgaccatcttcttatatatactgaagaaatgctttgccctgccgtatatctcagccttgatgccggcatctgtaacatacttcttgacatcgtttaccaggccctggatgtaggtgtcgcgctctgtctttctgagggctaccttctctaccagatcgtagtaggcatccggatagaggtacttcatacaaaggtcctcgagctctatctttatcttgctgataccaagtcgctgtgcgatagggcagtagatatcctgtgtctctctggcgatacgctgctgtgcctccttggactggtacttgagtgtacgcatattgtgcagtctgtctgccagctttatgaggatgactctgatatccttcgccatggcgagaaacatcttgcgcagattctcagcctgcatctcaagcctgtccgcattcttgtccttcggatccttggtgctgtctgtcagatgcaggtgctttaacttcgtgacgccatccaccagatgtgcgacatcgtctccaaactccgcacgcatctcatccatggtcatgatggtgtcctccagcacatcatggagcagtcctgctgcaattgtttccttatccagctcgagctcggcgagtattatggcaacacaaagcggatgtatgatataaggctctcctgacttacgcgcctgccccttatgggcatcataagctaccctgtaggctttgtccacaaggctcgtgtcatccgacggatggtactttttgatttcctttttcagctcatcgtaaagctcctctgggctcgtaaaatcctttgttccccttataccgctggtatctgagcgaaatttgtccgctattttttctaattcttctgttgagtaatctgccaatagtctcacctcgattgtagtgtatctttagtagccattatattttatttctttaaaaattgcaatcttatgttgttagccgataaccatctttactccgccatacatgccggctgagttgccgagtgtggcaagcttgatctctgtctcacggcttgcatggaaagcatactctttatagtactttgctgctgtatcgatgatgatgctgcctgcctttgaaaggccaccgccgacaacaaatacctcagggtccataacgcatgctactgctgccattgccttgccgagaagcttcatagactgctctactgccgcaatgcccgctgcatctcctgcctttgccgcatcgcatacatccttggctgtgaagcctgcatttaaatcaagctttgttgccacatccctgtgtgctgcaatgtatctctctgctactcttacaagtccgtttgctgatgcatactgctctaagcaacccttcttgccgcagccacagcactctgactcatcatctaccataggcatatgtcctatctctccgcctgctccgtttattccggctacgattctgccctcgcggatgattcctccgcctacgcctgtgccgagtgtgatcatgactacatcctgatggccctttccaccgccctgccacatctcaccgagcgcagctacgttggcatcgtttccggcctttaccttgatgccgccgcacagtactgagagtgactgtgccacgttgaacacaccccagccgaggttgacacatcttaatactgttccgtcatcctttataggtcccggcactcccatgcctacgccctcgatgtcacccatctcgatgccatgcttctcgttattctccttgatggatgctgcaatatcaggcaggatgagctcgcctgaattctctgtgcgtgtaggaatctcccatgtatcgacaagctttcctgtggtctcgaaaaagcctatctttacagttgttccacctatatctactccgtatgcatatttcttcattttttcgtcctccaaatcgttaaactatgtttatattttattgcctaattgcatatttttcaatgtttttcattgttttttatattttttctatatatagaagcgtttatatcatcatccatatgcccgctatttgtaaatccaagctttttagcaaggcgcaccgatgccgtatttttctcatctatccggcagtaaagctcttcaaagtctgtgttttcgcgcgcgtagtctatgatgaatcggcacacctccgtggcatagccttggttccataattccggcgctatcatatagcccagttcatcatgctcaagccctgccctgcctatcagcttccctgtttccctggaaaatacaagccacatgccatactcgtaaaagccatacatgttctctatatatgctttctgatattcaagctctgtctcgtagtcgtaaagtggctccacaaagtctgtcatgctgggcttgtcatagagctcatagagcgcaggaaggtccgacagggacagttcacgtatcagacacctgtctgtctcaccgatgtcccacggaatgtgattataccgcctgcgcacccgctccagatactcaatatcaagctctgcaaggctctcgactgcatagtgcgtgccgcactgcggttctcctactgatgctatgccgagtgagtcggctatttgcttctgctgcctgtttgatactatccagatgtagtctgtgggagctttcggtattcttagatttcccgtattagctttcgcggtgttatctgcagattcttggattgtcgttttttggaagtcattaattgattcatcagccggtagcgcaacatacagtttttcccgcagttcatcaggtagtttttcttgtaatttttcctgtaattcatattgctgctcgtctagcagtttcttctgcaactcatccagcaactttcccggtagtgcaccatacagtttttcttgcagctcttctgacatagatgccttgcctgccacacttctccactgcagcttgaatatctcgccatgatagtaaaaagaggcaagttttgcgcttgcctcatcgataattattatcattaaactgtctccggctccggatagtccactccgaaggtctcaactgttactgttttcatgacctgagcctcaagtggtttgtccatgtagtctgtgcgcacctcagcgatcttgtttaccacatccatgccctcgattaccttgccgaatgccgcatactcaccgtcgagatgtggtgcatcctgatgcatgatgaagaactggctgcctgctgagtcaggtatcatggtacgtgccattgaaagtacaccggctgtgtgctttaagtcatttttgaaaccgttgtgtgtgaactcacccttgatttcatagccagggccgcctgtgccgtttccgtcaggatctccgccctggagcataaagcccttgattacacggtggaagcatactccgtcatagaagttgtgattgattaagctgataaagttgtttactgtgtttggtgcgatttccggataaagctccgccttgattacatcgccgttttccattgtgattgttacgattggattctgtgccattatttttctctctttcttttataatattatgaggcttggagaatatccatccctcgcaattattaaatatcgaattaatttttactgattagttttcaccttatttttatttactcagtgcctctaccaccttcggaaactccatgaagtgcgatgccttcaccagtatggtgtcgccctccttcacatatgaaagaagctcctgtgtcatggtctccctatcctcgaaatagtggatgtctacatcggatgatttctccgctgctccggctgcatattcctttgccagctctcctgcggcaaaaagtgtatggatatgattctctccaactgcttcgcctacctcatggtgcagctttttctcatcacttcccaactctcccatgtcgccaagcactgctattgtcctgccctttgcatgtgaaagcacctcgatagaggatttcatggatacagggtttgcattgtagcagtcatctatcactgtcatgccgtgtgttttgataaaattggtacggcctgcgattgtctctgctttctcgattcctgatttaatctcagctattgtgagaccaagctgcaatccgacagccgctgccgccatggcattgtatacattgtgctcacccgggatatggatttgtgcatcaaactcaccctccggggtgacaaaatgagccttcataccgtcaaagcccaagttttcaatatttgtggtatatactgatttatgaacacctgaagctgattccttgccatagtatatggcaggctttccatttaccgtctgcactgtggccagcttgtcgtcatccgcattcagcactgcgaccgcatccggcatcatatgctcaaagcactctgtcttggctttaagcacaccatccctgtcgcccaaaaactccagatgacagtagccgatattggtgatgaccatgacatccgggcaagacatagtagaaagtctgtgcatctcaccaaaatcagatatgcccatctcaagcaccgctacctgatggctttccctgattccgaaaatggtgagtggcaggcctatctcattgttaaaattgcctgcggtcttgtggacgctgtatttctgttcaaggacagatgatatcatctccttggtgctggttttgccgacacttccggtgatacccaccaccttgatatcaaggctttttctgtaaaatgccgcgagctttttcatggcatcggtggttgattcaacaagcacatatgggcctgccggatccttcagctcatgctcagagagcacaattgccgccccctgctcaaacacagtcggaatgaatttgtgtccgtccaccctttctccctttatcgggataaaaagatagccctccttcacctgtctgctgtctatgacggcgccggtgattgtcgtatcgagcagtgtctcatcgcctatgtatgtgccctcgcaggcctttgcgatatttgcaaatgtaagattcttcatgtacttatccgacatgctacacctcatattttttcaaagatatgtcaatcagatgctcacagagctgattaaaactcataccgataaccgctgcctcctgtggcagaagactggtcggagtcatgcccggcagtgtgtttgcctcgaggcagaacatctcatttttgtcgttgagcaaaaagtctgagcgtgaatatgtgtcaagcccgataacacgcgcaacctcctcggcatagtgctgcatatcctttgtcacctgctcaggaagctcggccggacatgtttctactgtactgcccgccttgtatttgttcttataatcgtagaagccctccttcggtgcaatctctataataggaagagcctttccctcgataacgccgacagagaactccctgccatgcacaaattcctcgataaccagctcattttcccacttgaaggcatcgtcaagtgccgccttgaactcggccgcatccctaacgatggtgacaccgatgcttgaaccgccgcagcatggctttaccacgcatggaagtgtcaggtcaagctttgtgatatcgtcctgtctggtcgctcttgtcatggaaataccctttggagtaggtataccgtttgcaaggaagaactgctttgatgtctccttgttcatggcgatggctgagcttaaataatcgctgcctgtatatttgacaccgaagagatcaaatgctgcctgtatctttccgttctctccgttttctccgtggagagccatgaaaacaatgtcagccatctgacacatttttatgacatttggtccgaagaagcaaggtgactggtcctttctggaagcctttacctttgcgaggtcaggtgcctctgtcggaatatcgctgacctgcacgcttatctcgtccgcgcggtcaaatatacctgtcaggtcctcctccctgtcactatatcccataaatacatccaataatataactttgtggccgttctctttgagtgccttagctaccatgcttcctgtcttgaaggaaacatctctctctgtgctgagccctccggcaagtactacgatgttcatttttgtcctcttttcacattaactatatttctgataacactcctaaatccaattaaacatacggaccccggtaagttatcaattttttaaaattataacaccattcatataaaaaagaaagaccggttgcccggtcaaaaaagaaattctcattttattttaaactgtgttggcttccagcagctgtatcattctcataaataccatccgcccgtgcaaatcatcctgtgaaagtgattctccgtacttcaatactaataatcggcactgataaaaattcagctcaggattgccaaaaagcaaaatccgcaaggctgcattttccaggtaattgtgtatatttcccacctcaataaatatatctacaatatcatcgaggttaataagtcctttctgttcataataaattcttcccaaatatttcatccctccatcgactttatttttcgtagaacttcttttttgtctttcttttgaaattttgtcgcttttgcgaaatttcactctttgttggtggattcatttttccatataatatatcaatattctaggcgcgttacgcgcttgtattttgaagatttctattagaagatttaatattgataggtgattagcagttttcgacaaaatatgacatgggtttgggtttaattcagttggtttttgtttaatattgctctttttatatcagaatttttgtaatgataaatttgtactatttttgtggttttttccttgctggctgcatctggtagtcttgatgcaataagggcaatacaagataaatccataaagacttttgcccttgccatttttgcaacccggatgttatcaaggttgtaattatcttttaaatccccgaacgtacgctctacgctggttcgttgattatatagtttttcaaatgcttttgtttctctgaatggtgctgtaataaaccttgaattatctttgatttttcgacataatcgtaaccaagactgcgtcttagaaccggtaaccgggtcagatttgagacgcataaccaatgcctttatatctgataattgctctatttgcatagcataatgtacaatagccataggttgatagcatagtgggcaggtcttgaggagctataatccataaaacttttaaaacagctcccaaaattcagcccataagccggaaaaaatacgagaaaagtagctgaaaccgcaaaaatctccaaaacagctctcaaactcagcccataagccggaaaaaatcgcgtgaaaaagtagctgaaaccgcaaaaatccccaaaacagctcccaaaaccagtccataagccgaaaaaaatccagaaaaaagtagctgaagccgcaaaaatccccaaaacagctcccaaaaaccagtccataagccgaaaaaaatccagaaaaaagtagctgaaaccgcaaaaatctccaaaacagcttaaaaattagaggcttctggcataatagtggaagcctctaattatttcacataaaaagagcctccacatttctgtgcaagcttcttttgaaaactaaaaactaaaaaatatattgttttttatatgtcctgaaacatcagtaaaatcaatgactatgaattatgtaattctctcaattatttcattttttgaaataattttgacatgattagaaatgaatgttaaaatatagttaacaaaaaggtgctacctataacaacggttcgcctgatcatttacttagttaaaataaccgttcagtttccaggctggggcggttattttttgtggtcttactgccattggaaccaatcgcatatccaagaccaaatgaggttaaacagagactgaccactgcactcaaaaaaaccggcagccaacggctgccggttttcgatgaaagaaaggttaaattatgatgaaaaacaagagtctaacattccggttcgataagtccgtatgtatgtccttttctcttgtagactacatttacttcgtcattctctgcatttctgaatacgaagaaatcgtggcctgagagctccatctggatgcatgcatcctcaggatacataggcttcataccaaatctctttgtacggacaatcttgatttcctcgtcctctgcatcgtctgcctccacgaaatcatcctggaatatcgccggtgcatacttctttgcggaaatcttggttctgtatttgcgaagctgtctctcgattacttcctctacgaggtcaattgatacgtacatatcattgctgacctgctctgaacggataacatgtccctttgccgggatagtaacctcgattttctgtctatccttttctacgctgagtgtaacgtatacgtctgtgtccggtttaaaaaacttctccagctttgacagcttctcctctactgcctgcttaagcccctctgttaattcgatgttttttcctgaaattgttattctcatgatgtccaacccctttatcgtttatttgatacgttgtctgtatcatgtaaatattataccataaatttcgttttcatcaataatttttatgcaatttatataaataatcaagggtttatttacggtttttcgcgaaatcgcttgatttcgctatgattagggatttcatcagaataaaaaacatcaagtcgagtgattttttatacactatcgcaacatttctcaactacaacagcacatctaagctatcacaacgtttctaagctaccacagcgcatctaacctatcccagtgcctcaagctgagaggaaagctcctcccacgcctccatatctataaggatttcttcctcgagagcgtctatttcgttctggatttccgtgagctttgagtagcttgactgatactccggcttcattagctcggccttgagctcatcgagctttgcttccttgaccgccaggtcctcctcggcctttttgacctttttttgtatctttgagcgctccttgcccgggttgtagtatgccttgccggttgatgagacagccatgccgcctgcctgggctgcgctatttgcattggtgctttcgcccacattacctgctgcaccggtttgtgacgtgctccgttttacatcactgcctgtctgactgctgccgttctggcttatcgcgccgccaaatattgcattgcctctgtatacatttttgctttcctcagcctcacgatcgagcttttcctgatactgctcatagccaaactgatagagattggtcgtgccatcctcgaacacaagcagctgtgtggctacctttttcacaaaatatctgtcgtgtgatacaaaaatcagtgtgcccttgtagtccttaagcatgctctccagcgtttccttgcctacgatatccatatggttagttggctcatcgagcacgagcacgttcggtctggtctttaaaatcttgcaaagcgccagtctgactttttctcctcctgagagcatatttacgttcttgaacacgtcatcccctgaaaaaaggaaggctccgagtgcatttctggcctcggtttccgtgagattcggatactcatcccaaaaatcatcgagcacagtcttgttgcttgtatacatggccatttgctggtcgaaatatcctatctgcacgttggttccaaagcggtactcgcctgaaagtgcagggatcttacccacgatggtctttaaaaatgtcgattttccaagtccgtttccaccgagtatgccaagcttttcgcctcttttcaaatcaagcgacactacggagagcggatggtcatagccgattgcaagctctgatgtataaagcacatcgtttccggtctccttttcgggctggaaattggcatggaaggtcttgttgtcgtacttgtccggcgcctcgataatcaccatgcggtcgatagccttctgctttgactgcgccatggatgtcttggtcggcttgcccttgaagcgcgtaaccatacgctgcaaacgctctatctccttctgctgggcgatgtgatccttcatctgcttgtcgtagttttcctttttgcgggcgataaaattggtataattgcccggatagcgccttgctgtgccgtactctatctcgtataccacatctaccacattgtcgagaaacatacggtcatgggatacgacaaccactgccttcgggtacgacttcagatagccctcaagccactcaatcgtcgtgacatcaaggtggttggtcggctcgtccaaaagcagtatgtcaggctttgacaaaagcagctttatgaatgctatcttggtctgctgccctccggaaaagtcacggattggctttttgcgctcatcatctgagaagccgaacttgcggatcatgacctcatattccttctcataatagtagccgccatcatccttgaaggcctcctccatcgcggtatatctggctaccttttcatcggaataatcatgctcgagctctgccgccgcgcgcgcaagctctgcctttcgctcgtccattttcacgaagcatttgcgcacctcctgctcgagtgtcacatcaggatcatcaaacgcaatctgcttcagataccctatctccgggtttcctgcctttgcaataaaggcgctctcatcgctgtcgagcttttccatctcaacctcgcctgaaatgagctttaaaagtgttgtcttgccacagccgtttctgccgactatcgctatcttttctgtgtttctgatttcaaaatctatactatgcaaaatgacgtcgtcgccaaatgcgacagcgccattacttatctggtagagcatatactatcctttcatgcttatgcctgctgcttaattgttagccataatgtagttgacaaactgtgttgcagtacgtcccgaaataccaccgtggctgagttcccacttgtttgcctccctgcacagctcctcgtctgaaagtgtgcagccgctctttctcgcaagctctgttacgatgttgaagaactccttctgcgatggctttgagtagctgattgtcacaccaaaacggtttacaagtgacaacttctcctcaactgtatctgagtgatgcttgtcattgctgttgtcctggtcattgcggtcattccatgtctccttgatcaggtgacggcggttagatgttgcataaatcagtatgttgtcaggctttgtctccacgcctccctcgataactgcctttaggaacttgtactcaatctcatgctcctcgaatgagaggtcatccatatatatgataaatctgtagtttctgtttttgattgctgcgataatctttgacagatatttaaactgatgcttgtatatctcaatcatgcgcagtccgtcatcataatactgattgacaatggccttgatgcttgttgattttccggttccgctgtctccgaaaagcagcacattgttggcctttttaccctgtacaaacgcttctgtattgtctgtgagctttttcttctggatttcatagccgatcaggtcatcgagcatgaccgcatccatattgttgattggcatgaaagaaaagcccccgtccagatgctcctcaatcctgaatgccttgttgagaccaaacatgccgactccgtatgccttgtaaaagcctgttaccacatcaaagaactcctgctcatccttagctgcctcaagcttcttgctcagcgcccttaccttctcgctgacattgtgattgtacataaggtcctttttcacaatggccttataattgctgatctgtgtgaagcagtcgattccgagtgctgactcgattggcttgaaatcataatcgaaaagcttcttaaaaatcctgaaatcgtttgccacaagcccatttacgctgccatcgctggctccgaccttctcacatgtgatggaaaacggattctcgctcatcataaggaagaaagtgagatagttgtgccacagattgtcatcaaagccatagtctgtcgctacctttaagattctctttacctgtgtattgatgtcgcgcacaagctctgtcttgttgtactcgcccacctcaaactgctcaaagagctgtcccaatttataaagtatctcatcctgagataaatctccgtacataagtaattttgatatttcctgatacatggctgttcctcctggttttgccttgttttcgctgctaacatatgattataaacactgcgccacgattttgcaagagcttgtgtgcccggttctcttattactacgggctgaaatatgtggggccggtatggcgcgggggacgtaagccccgggcagtgggacgtacatcgtactcccgctggagcgcatagcgaagtgtcttagagtctgttgaattatgcctcaataaacagaaatgcccagccatggacggctgggcaaggcgttatgcgccacggacggcgcataaaagccggtttcgtcgggcatcgaaaacctataaagcataattcctacagactcttagacaagaagcgtagctcacgcgggagtatggtgtgcgtccaactgcccggtgcttacgtcccccccctccatgcaaaaaggcggagctaaaactccacctttattgttgtgccacgccccacctcgctgtcgagcgtaagccctgcatcatgcagctccactatatgctttactattgcaagcccaaggcctgtgccgccggtctccttcgagcggctcttgtctactctgtagaaacgctcaaagacgcgctcctgctgatcctttgggatgcctatgccgttgtcctcgatcgtgagaactgtcttgccacctagcttgtgtaccgtcacatttacggtgccgccctcattgttgtagcggatagcattctggcagagattctcaacgagctctgtgagaagctgcctgttgcctcgtaccatacagtcagtgccgtcaaaattgagtgctacttttctctgctcggcattcacctgtagactttccatgcagtccttgaccagaccgtacagatcaagctgttcaaagccctgctgcgcctcgctggaatcaagctccgagagctttatgatatcattgattaaggaaagcaggcgctgtgcatttcttctgatttcagtggcaaaatgaatctgctgctccttttcgaccatgccgttttctatgagctctgcatagccggagatggctgtgagcggagtctttagctcgtgtgacacattggctgtgaagtcctgtctgctctttgccgcggcaagcacgccctcatgctgtatccttatcgcattcatgaacggcacgagttccttgtactctgtctttttctcgatgacagaggcctgctccaggttgcctgcgagtgtctcgattggcttcatgagctttctggtcaggctctttgcgagaaccacacatattcctactattataaccgtcactataagcatggcaggtatactgcttgcaaacatgttccagatacttcttgctgcaatagagacacgcagtaccgttccatcattgagctttatggcatgatagaaggtattgctgttcatggtggctgatgttctcacgctgtctcccgtacctttatcaaatgctgattcaacttccggtctattgccatgattttcaagttttttcacattattttgattgtcatacagcactgtgccgtccttgtcaatccaggtgacacgaataccctccacgtcaatctgcggaatttcatttatattctgttttagtattccggtgctttctattgtctctgccatgacctgcaggtcttcctttacctgcttctgaaagaggtaatagttgattactgtcatggaaaccatagtggcaattgctacaaaaagtgctgttgctaccagatagtaattaatcttctttttcatgctgtacgctccgcttatgtatattagaaatcattataacagctattattctataacatagcccacatttctgactgtctttatcctgctgccatagtcacccagcttatggcggagtgtctttatgtgcatgtccactgtacgtgtctcgccctcaaagtcagtatcccagacgcttctcatgatgacctccctggtcatgactattccctgactgcccatcagaagccttaaaagctcgtactccttgtatgtaaggtcaaccggctcattgttcactgtaaccacatggcgctcatggtcaatcaccagatcatccagctttaaaagcttcggctcctccttcgctgttctcctaagcagtgcctttactcttgtgataagctccatgattgagaaaggctttttgatgtaatcatctgcgcctccgtcaaacccttttatcatatccatctctgttgtcttggctgtgaccattataataggaatatcctgtgtggccggacgttttctgagctttctcacgatatcgtagccgctctcatccggaagcatcacatcaagcagtataaggtccggtacgagttcatccagcttcttgtaaaattcctttgcattttcaaatgcactgactatgtaattactgttttttaaagcaatactctctatctcacgtatgctctcgtcgtcctctacaatataaataagtgccatagctttctccatttcaaaaaatcttatgtaaaatttttacctgctttttactttcgattatacattactaatgtaaaacagacgatggttttatgtaaaatttatgtaaaatccatcgcctgtatcaattttgtctgtatataactatgatttaatttttcagcataaagattaaatcatgatttgcgaaccttatcatcaagcgcaaactcaacccactcagcaatatttgtcgcatggtctccaatacgctcgaagtattttgcaaccatgagaagatcctctgcctgctcaccatcctccggatgttccctgatgaaatcaataagctcagcctttaccttatcaaaaagatcatcaaccacatcatcctgcttcatcactatgcgagccttgtcattgttcttctcaacatacgcctcgattgccctgataagcataagcattgtctctgaagccatgctcttgacatgctctatattgaccctgtatggcttgtcactgctcatcaaaatggtcatctcgctgatatcggctgcgtggtctcctatacgctccatatcagtaaccatcttcatcgctgcagaaattgttctaaggtctcttgctacaggctgctgctgcatgagcagattaaagcacaggctctctatctttttctgctctctgtctatctccgaatcgccctccatgatgtctttggcgctatcggcatcctgatgtataaatgcctcgattgctttctggattgactcctcaatcatgcttcccatgtgcatcatttcttcattcagcttcttaagctgctcgtcgaatttcgatctcattaaccaaacctccctgtgatgtaatcctctgttctcttgtcctgtggatatgagaaaattgtctttgtgtcaccaaactctaccatatctcccacaagaaagaaggctgtatcgtctgacacacgcactgcctgctgcatgttatgtgtcactactacaactgtgtactttttctttaaatcctccatgagctcctctatctttgaagtagagatagggtcgagcgctgatgtaggctcatccatcaaaagcacctccggctgtacggcaagcgctctcgcaatacacagtctctgctgctgtccacccgaaagtcccatagcagatttctttaatctatctttaacttcattgaatatcgcagcaccctgaagactttcctcaactatctggtcgagtatctttttatccttgatgccatgcactctcgggccatatgcgatattgtcatatatgctcatcgggaacggatttggctgctggaaaaccatgccgacctttttgcgaagtacggttgtatcgactgttggtgcatatatattctcaccatctatctctatgcttccttcgattctgacgttgtcaaccagatcattcattctgttgatgcactttaaaaatgtagacttaccacatcctgacggtccgatcagcgctgtcacgctgttttcttttatgtccatattgacaccatgcagtgcatgattctggccataatacagattcaggtcgcgaacctgaattttgatttttttctccatttgtatctcctgcaacatgtaataaatttcttgtcttcgagaatacattatatggatgctttgtaaaatgctctatcagatgtatgtaaaatctatgtcaaatttttacacacataaattattcgcactgtttgtatttattatttgtatatactatttatatgctttatagtcggctttattaaagtactgtctggttaaagtattgtatctttaataattaaaagctcatccattatcctgtctgcatcaatatttgagtaattgataataaactgatgcctgtcctcctttggcttgatcaggttgaaatgggtaatcgcctgaagctttatgccttttttcaaaagcctttcttcaactgttttgtccggaaggttcgtgtcaaactgtatgataaaatgcagtccggagtcattttctattaccctgcattccttttcagtgaagcagccttttatggacgaaagcacgctctggcgctttctgccgtagtgcagtctcattctgtttatgtgcttttcaaaatagccctcgctgataaatcgtgccagcgtatactgctcgaaggtcgataccgtacatgagtaaaatgaaagcctcctgtaaaactcatttgccagatgctccggcagcaccatgtagctgattcggatggtggatgtgagagattttgaaaatgtatttatatagatgaccttttcacacgcatcaatcgagaggatgggcggtatcgggtgtccgttcatgcgaaactcactgtcgtaatcatcctctatgatgtatctgtcactgctctcgttggcccatgccaaaagctcatagcggcggttcacaggcatcgtgattcctgtcgggaaatggtgtgtcgggctgatatgtgctatctgcgcgttcgctttctttataagctccacgctgatgccctgctcatccatctgcaccggcaggcattttgcattgttgcactcgtatatctggctgattttcttatagccaggatcctccacgcagtataccttgtccgtacccaaaagcttcacaagcagaccgtacagatactctgttcccgctccgactattatctggtccgggtccacattcataccgcgaaacgatgacagatggcttgctatcgcttccctaagctccctcactccgccacacggcgacaccgacaaaagctcctgttccctaagggaaatcgtctctcgcataagctttgcccatatggaaaacggaaagttacccgagtctgtcctgtttgatgagaagtcaaatatactttcatcctgctcaggtggcagctttatgctaagctccttctgcaccggtgccttgattaccctgatatctgacacatcggctatgaaatagcccctctttggtcttgcaaacatataaccctcgcctatcaactggtcatatgcattttcaaccgtaatggtactaacccccagattctttgcgagggtacgttttgatggcattttctccccggagcttaattttccctgtgatatatcgtttttgatgcactcataaaggcatttgtagagtggtccgtctgtttttgtgaggtcgtaggtcagcatttgattcaccgctttctggcatttttattttccttattttgaatattttaatattaccagatgtggcgtaatattgcaaccatgatatatggctggcgtgagcaaatacagcccggcggcgcaggcggcgagtacactctcgtgttcgctacgctttgctgccaagatactgtaagaattatgccttatagtttttctatgccagacgaaaccgtcgctactcgccctccatggctcgatagctccttgccccggcttccatgccggtgcatttctggttctcttgggcataattcaacagtatctaagcagctccgctatgcgctctcacgagagtatacacgccgcctgcgccacctaaacatatttgctcacgcctgacttcttccgtcatataaatgattaaagggacaaaataccttttgaccctcatatcatataaattgatgcaaaaatacaaacgcaaaaaacaaaaggagatttaacaaatgaaaaacaataagaatactcaatacgaactcaataaaggacttgcacagatgctaaagggcggtgtcatcatggatgtcactactccggagcaggccaggattgccgaggcggccggtgcatgtgctgttatggcgcttgagagaatccctgctgatatcagagccgcaggcggtgtttcaagaatgagcgatcctaagatgattaagggcattcaggaggctgtcagcatccctgtcatggcaaagtgccgtatcggtcacttcgtggaggctcagatacttgaggctatcgagattgactacattgatgagtctgaggtgctttcacctgctgatgatgtgtaccatataaataagagagatttcaaggtgcctttcgtatgtggtgcaagagatctcggtgaggctctccgccgtatcaacgagggagcttccatgatccgtacaaagggtgagcccggtaccggtgatatcgtgcaggcggtcagacatatgagaaagatgaattctgagattgcaaaacttacttccatgcgtgaggatgagcttttcgaggcagctaaaaatcttcaggtgcctttcgagctggtcaaattcgttcacgataacggcaagcttccagttgtaaactttgcggccggtggtgtggctactccggctgatgcggctcttatgatgcagctcggtgctgagggtgtgttcgtcggttcaggtatcttcaaatcaggcgatcctgccaagagagctgccgctatcgtaaaagctgtgacaaactttactgatgcaaagctcatcgcagagctttctgaggatctcggtgaggctatggtcggaatcaacgagagcgagattaaaatcatcatggaagaaagaggcaaataaaatgaaatcaggacttaagattggtgttttagccgttcagggagcgtttattgagcacaagcgcatgcttgaatctttaggctgtgagtgtgttgagctgcgcaaaaaatcagatatctgtgacttagacggactcgtgctgcctggaggtgagagcactgtgcaaggcaagctgctccgtgagcttgatatgtttgatgagcttaaggaaagaatcgcaaacggacttccggtgcttgcaacctgcgccggtcttatccttttagcttctcatatcagcaacgatgacaacgtatatttcggcactttgcctgtcactgttaaaagaaatgcctacggcagacagcttggaagctttgaggctacagcaaggtttgacaatagctttgactttaccatgacatttatcagagcaccttacgtggaagctattgatgcttcagcaaagaatgatgtgcgtgtactcgcagagtatgacggcaaaattgtcggcgtgcagtataagaaccagattgggctggctttccatccggagcttgatgatgatacacggattcatgagaggtttttggagatgatatcgggaaattaaatcacgtctacagtctgaggccggggcagatgccccggatttttataccgactttttgtggtaaaatataaaatgcattttttttaatatatggtataataaaatagtagagtgaagattattttttaaggaggggtagcatatgccaaaagctatgtataatcttattagacaatatattgaagaaatcaaaaaaatttatggttcacatgtcagacagattattttatatggttcgtatgccagaggcgatttcagacccgactcagatatagatattatgattttggttgatatgtcagatattgaacttaaatcttatggtgagaagctttcctatatgacatatgactttaatctggatcatgacattgacataaaaccaattgccaaaagtgaagagatttttaataagtgggtagtaaattatccattttattcaaatattcataaagagggggttatactatatggagcagcatgatgtagaaattggtacaagaagagatcttgttctatatagaattgaaacctcaaagaatgacttaaaatccggggcagatgccccggattttgttgtttcttatgtcgtataagttcaatatataatatagttttaaaaagctcaaaactccagagtcaccttaaataaatcaccgtccacagtcaactccaaagtaccattcataagcttcataaggctttctgcaatagacagtccaagtccactgccctcggtatttcgtgaactgtctcctctgacaaaacgctccttaagctcatcgcttgaaatattaagcggtgtagctgatacattcttgaaggttatgatggctccgctgtcctttggaatgatgtcaatatacactctcgtacccggctgggcgtatttgttgatattgttcatcaggttatcaaacactctccacagatgtcgtccgtctgcctgaatcatgacaggcgtaacgtcatttttaataattaaatcaagattatttttcttgaatttttcttcatattccccagccacctgtgataacataacagctgcatccagttcctccagctctacgtttatgctgcccgtagatgcctttgacgcttcgagtaaatcctgaattaattttttcaaacgtgatgactgtctgtcaagaacgtcaagatattcgcgtaccttctcgttatctatgtccgccttctgcaacaggtccacataattgataatcgaggtgagcggtgtcttgatatcatgcgacacatttgtgatgagctccgtcctgaagcgctcgctcttcattttttcagagaccgcggcctctattccattgctcacattattcaaatcctctccatgctttctgaaaaacagcatgagtcttgacgtatcaaccggctgtgaaaaatcaccgtttgctatagcctttgcggcgcatcttatcctgtcatactgcatgataaatgcgataagcagagcaagctctataagctttataatgaatataaatccaatactctctattccaaatcctataagctcaagcaggcatatgaaaccgaatgccagcatactgatcagaaacagcggtacatttctttctatccatgaaaagccgtatctgattggagcaaataccatcctgcatagctttttgacaggctttaagaaaaatctcacaacatagtagcacaatgtatgcttccagaactcatgtgccctgattcttacgtatgttgtcaggattgcttcaagcgaaaccatggttgccgccagacaaatgagtgccaccaccggaagctgctttataagcaaaaagcctgccggaaataccataaagtctgcaaacattgtcactccaagcatcacctcatacggcagcctgtcatataatcgtaatttaatttcttccgaattctcacgttttccggcaactgtcagcagataccccgctgtaatcacaaaaccaagtataaatatgacaaacaatacacttaaatgagcctctgtaaattccatgacgtcaagtaagctgtctgcctgattgaagtaatcgcccttttcctgaagctgctgcggaagctttgcatacacataatagtactcaggcttatcttccgtttgggtgtatggatagtacacaattccggtatccgatatattaaaggtatccggtaaaagctcatagctctcattcacctgctccaccacttttatgatttcgtagctgtcataataaatatcctcatcataatcgtagtaagagccgtcactatcaaagcgcgaatcgccgtcatcactcagattcatgccacactttatatgatttcctttttcatcatagcactttacatttttccactcggcaaagcctgtaatatcgagtgactggcctgtaaacatctcctcgtaggcaaagtaattatttccattctcatcggttttctcaactgccttatataagccaagcgagctgttatcgttagagcctgtcatcaccctcacctttggaatgacataagcggtaccatcattcaggcacagataaaagagcccgtttgtcttggaatacatgattgagctgattctctcactgttcatatcgcttgaagcagcgtctgactcttcatagctgccgctcattgcatcccacagatatgatagcctgttccactttaagttctttgccttgtagctaaaaatataatccggatttgatatttcatccacacttgaatacacctttgctgcatcagattttacatctaccttgtcctctgatgtttcattactctttaccactgcggcctgcagatttgtatcgtccatcatctgcgaaaatgcattgtcatcaccggattcataattgtacaccatctgtctgctataggctcctgcaatattcgcatgaatttcatcccttagctgtgctgtactttcataattgtttgtatacactgcaactaacgttgttacaacaagccctgccgccatgaccgagcatactataaatgccgccagcttaagccacagatttcttgatatttttttcatatcattcaccttccattttatagtgcttcacctgacaaactttatcaagcatgcacctattcagcgtcaattttgtatccgcgaccccagatgacctttaagtatcttggctcagccggatttatctcaaccttttctctgagatggcggatatgtaccgccaccgtgttttctgtcccatacggctcatccttccagacctttgcatatatctgattcggcgaatacacctcgcccggatgctccatgagaagcttcaaaatatcgtactctgtacgtgtgagatttgctgcctcgccatcaactgtcaccgtctttgatttgtcatcgagctcaatgccgcctattaccagctttcctgcgcttgtattgcctgcgccaagaagcatgtatctcctgatctgtgacttcacccttgcctgcaactctaccgggttaaacggtttcgtcacatagtcgtctgctccgaccgtgagcccgagtaccttgtcagtgtcctcacttttggcagtgagcagtatgaccggcacattagagatttttctgatttccaccattgcctctatgccgtccatgacaggcatcatgatgtccatcaggacaagatgcacatcattgtgttttactatatcgagcgcctccagcccgtttcgcgccgggattacctcgtagccatcgctggtcaaataaatgctgattgctgatacaatgtctttttcatcatcacatactaatactttatacataattgcctccggaagttttatgttgatcttattgtatcaattgtaacattaaaatccaattatgtaacacattaagatttgtttaagaaataatcttaatgaaactaaaaagaagctccgatttactgatatctaatcgaagcttcttttcttagttagattattatatttgttatttactatattcgttaatttattattatgattaaaggggtaaaataccttttgaccctcatatcattataataaccggttgatttgcttacttcgcctggaatttctttgccagcacctttgtcaggatgttgattaagaatacgattacgagaagcacaaccgcaattccaaatgcctggtcgaattttccttcacttgtcgctgcaaggtagagcttgatggtaagtgttccacctgactgcattatctttgagaaataaccgctggcaacctttggaagcattcctgcacttcctgccgtaaagagaagtgctgctgactcacctactattcggccgattgcaaggataacacctgtgatgattcccggcatggctgacggcaacagaatggtgcggatggtatgccattttccggctccaagtccgactgctccgtgtctgtagctgtccggtacagttttaagcgcctcctgtgtatttcttgtgatgagaggcagcaccatgagtgtcagtgtcagtgagcctgtcaggatactgtagccaaagcctattgtctgtccaaagaacatcattccgaagaggccaaagatgattgacggtattcctgcaagtgtctctgtggcaaactctattgtggatacgagcttacccggctttgcatactcattcaagtacacagctgctcccactccgacaggagtagctatgagcatggtgataattatgatgtaaagtgtattgagcaggtttcccgctattccgacagtgcctcttaagacagatgtctcgctggtcagaaactgccagtttacctggccaattcccctgataaatacatatatgatgattcccgcaagcagcactaccgataatgctgcacacagatatatgaaaaagtatactacatcatcgcctattctgcggcgttttccatttatactagtcattttccacagctcctttctttttgagtttcataagggtgaggttgattatcatgataaacacaaaaagcacaagacctactgagaaaagcacctgtctgtgaagtccgctggcatatcccatctcgctgacgagctgtgtggtaaggaaacgcactgagttgaacggaagtggaaagcttaccgttccaccggctaccatgttgatagccatcgcttctccgagcgcacgacctattccgagcacaattcctgtcatgattcctgactttgctgcaggaaccgtcactttaaatattgtctgtatctttgttgctccaagagcaagggatgccgctctcatctgctgcggtactgcctgtattgatgatacgctcatgttgattaccgtaggaagaatcatgattgcaagcactatgattgctgcaagcagatttgatccgccggtaaactgatgtgttgccgagtttgcaaaaatatgtttctccagcttgtataataccggattaagtatcataagtcctaaaagtccatagattactgatggaatggctgcaagcagctctactgccggctgtactaccgctgagagctttttgtttgacacctcagtgagaaatactgccgtaagaagagcaatcggtactcctatgagtatagatactgctgttcctatgatggatgtgaggattatgtacaatattccgtagcttgggtctgccgctgtcggcgcccattttgttccgaataagagatttaacactccgaccttgaaaaatgccggtgcgcctttaaggaacatataaattgttattgataatactgcgaatattgccacaaccgcacataccgtgaatattattttggcaacattctctactatggatttatgtttcatttgatactccttgtttcaaaaagttccccaggaaacctgccatttcctgaggaaaccctgtatcttatcgatatgtattaatactgatgtctaatatcgatgtctgtattttgtattattttttatacttactagcgatgtctcgtatcgatgtctgtatttcgtatcattaatatgcccgataatttctactgagggaggataaggcccaccttcttgataactgcctgtccctcatctgagtttacatagtcaaaccaagctttaacaatatcgttctgctcgtcaatcttgccctttgtagccattacgaatggacgagaaagaagatatttgcctgccacaatgttttcctctgttgcctctactccgtcaattttcattgctgttactgtatcatcaagcacgtcaagtgaaacatatccgattgctcccggtgttgagcctacctttgcaagaactgctcctgttgagtcaagctcctgtgcatatttgcactgatcctttacatcaagaagctcctcgaatgctcctcttgtacctgaagctgcctcacggccgattgctacgattgcctcatcttttccaccaaggtctttccagtttgaaatttcacctgtgtagattttctttaagtcatctgatgtaagctctgttactgagttgtccttgtctgtgattactgcgattccgtcgattgctacgatgttttcctcaacgccgtttgctttctcatcatctgtaagtgctcttgatgaatctccgatatctacgcttcctgctgttactgactcgattcctgaaccagagcctgtatactctactgttactgttactccagggtttttctccatgaatgactccttgagcgcctcacaaagcttctccattgaagtacttcctgcaagtgaaagtgaaccgtttaagttctcatttgatgtaccttcatctgcgcttgtatctgcattgttgtctgctccgtctgagcttgaaccacatcctgtaaatgctgctgtcatcattgttgcagcagttgctaaaactaaaagttttttcatacgatttttcattttaatttcctctttcattactttcttgaatttatttctttgtttgttacaactgatatagtaatagggaaatgtaaaatgcaaaatcattagtgtgtaaaatgcatgtaaaaaaatatttttaatttacagtacgattgtaaattcatatcctccggtggctgtacatctgttctgccggatggtggctctttgagcgtgggagtccctttatttgtgctttcatctgctgtattgccgaatgtatctgtgtttgcgttttctgtatctaaaagatccaggaatgttcctccttttccggcaatcagcttaagacgcgcatccaacgcctcgtttgtacttatatagtttgcaatgtttatcgtgcctacaattgtaaaacaattgaaactcataacattgctatggctatgaattttcttcgtaattttttgagcattttatcacctgcacattttttctatttcatgctctacgtccatggggtccaatggactttccgctgtttcatatgtcaatataagattttttccctgataatatccattttcgttatatttcaatatctttcgataagctttatttcgataatcaggattgtctatcaagccaagatgctcccacagaattatatcgccatttttcttctcaaccgtaaaatcgggataataaataccatctgagattttaatcgccttctcgtactcaaactttatattattatcatacaaggctgtcgcaataattacttctgattttgaccgcactataattcccattttagtataaaacttgagtgcttcagggttaggaacctgtgtcttttcatttgtctcttcattgtccttcttatcaactgctaaaagtatacttctataatgtttttgcttcaacattttctgggcataatcggttttatattttttccgggccttcctgtttgtctcgagtagtctgagctcatttattgtatccttcaaataaagctccagatattttttattgacaagatttctgatttctttatcatttttctttgataaatactctcttctgccatttttccaaacataccatttaacatttccatccttttgtgttggatagattgtcccttcctcagtgatggtctccagcctttcctgaatctctaatatctcaccttccaaccattggattctattatctattgaacttattttattttcctcctaactctttgcatcatgtgatgccatgtatgtgattctaacagtaattcaattgtttttgtggggaatatgataaatgaaagctgtcatttatcttcaaaagtggagattatggtctccatttgtttgatagcaccatataaatttgctgcgggaacacagaaaattagcggatttcgaggtgtagtcagattatggaaatgcgtagcatgtagcaatctgattaatcataaatgaggggcaaaataccttttgcccctcatatcattattatcttgtatgaataaaataaactatgcattattgctttctatgaataaaataaactatgcattattgctttctatgaatgaaataaactcagcagcatttctcggttttgagaaatagtagccctgaatgtaatctattccaagctcatccagctttgccaactgctccttctcctcgattccctcagaaacaatctcaagctttagcttttgaatcatgcccattgcggcatccataaccggcttgccctttccgttgtcaaaatatgcatttgtcatgcctctgtcaaacttcacaatgtcaatcggcatatcaacaatatagcttaaatttgactgacctgtgccaaaatcatccagcgcaaacctcactcccaccttacgcagggcattcatattatcaagcagtatctttttttcagtgatagatgcagactctgtaatctcaagtacaatatcatttgcatccacatgatatttctccataattgcaataaaatcctgcgctaaatggtcataagcacactgcaccactgacaggttgcattcaatatactcaattcccatcgcatgtatatcatgctgtacaataaatctgcacactatctcaaacacgcgctctccaagccttaaaatgagtccccgcttctcagctacagcaataaacctgcccggaggtatgatatttccctcgcgcgaccttattctgacaagcgcctccgcagaggtgaatttattcgttttagtgttataaattggctggtaaaatacctcaacacggttatcgcgcaatgcctctattatctcattctcaaccgaattttcatcatatatgtgctcaatgacttcattatttatgagcatcacgccgcgccccgtaaactcagctctgttacgcttggcatattgaaaaagccccagtatatccgatggtctccgcacaagctcagtagaccttagataatatatctccccaaacagcatcgtcatattgtcactgccccatggcttgtcaaacctgcgttccaatattccgattgttttttctgcacaatcagtattctcaaaaaccagcagatactcgtttgccgagcttctaaaaacataattatcagtcagcttatttataaaagaaaccacctcataaaaaatacttttttccatctcgcgggtgaaaaaatcattttcattgcttccatagcgaatacacactatcgatacatcattcccctgtccatatgcctccttcatgtattcaaaaagggcattgaggttgaaaaatcctgtatccctgtcaatatttgccatcggattttcaagcataataaaaaggataagcacacctatcacactcgcaaagctgacaatcaatatttttttatctataaactgaataaccgccgatataaacataagagccacccagacctgcatgctctttcttcttctcggatttatagcctgactgtatttttttgtcagcattagaataagcgccagcagaattacagttactgcatatgttataataacagccggaccatatgtataaactatattatccgaatcataaattttaatcggtacgaccattatcagaatatcagttaagattccaaatacccacagccgctttctccacttgcgctcaagctcttttttcctgaaaatatccacgcatatataccagaaggccaccatggcaacccatgtaaccgtccagagatataatttgcagataatattggtagcagtatgaggatatccgcttcttttttcaattgcaacaagtgcgaaaatatcaaagaaaagtgacagcaagcctgcaatccatacctcaacaaaagccttcgatgtatgtaatataatctttttctgcgaaatataaaaatacattattacgaacatcaccgcaatggcacacatttgtgaaacaatattcatatcccctatttcctgtacctttcctaaaccaaaccaataccctagtactattttactgttattttaccaataaagcaatatattgttttgatttacaaagaactaaataaaaaagttactattcacactgaacagtaacaaaaaaacacgctatgcgcgtgctccaaaataatacagtcgataactattcagatacatacataaataaatcggcgtgacaagattcgaacttgcgacctctacgtcccgaacgtagcgctctaccaaactgagccacacgccgtctgcaattcgttttgcaactattaaataatatcacaatgtataaattttgtctaccccataatatatatttatggtatgatttatgctgtataagatgataaaaatttacactattgtgcccagcctcacagcgaggtatcatacccatggcagaactgtaatttaatcacgtaattattttctttatactatgaagccggcccgacagcgcagcgatcggcttagcaccacggtatataaattataaggagaatatcatgacaaatcagacaaatcacaccaatcacataaatcacataaataaaacagctataataaccggagcttcacgcggtatcggtgccgccattgccaaaaagctggcttcctgtggctataacctctcactttgctgccgcaattcatctgacaggctaaaggctctggctgatgagcttcactgtgcatacggaattgaggtgctatgctacaccggaaatgtaggagactttttctttgccaaggatatggttacgaataccatttcccattttggccatatagatgtgctcattaacaatgccggcatatcgcatatcgggctactgagcgacatgacaccggaggaatggaacaatatcgtggcgataaatctgaccggtgttttcaactttacaaagctcgtcaccccttatatggttgccgataaatgtggccgcatactacagatttcatctgtctggggcaatgtcggagcctcctgtgaggtggcatactcagcctgcaagggcggtataaatgcatttaccaaggcactcggcaaggagcttgcgccatcgcatattccggtaaatgccatagcctgcggtgtcatagataccgatatgaaccgctgctttgatgagacagaacgcgctgagctggccgatgaaatccctgccggacgctttgccacagcctgtgaggtcgcagatatggcttactccgtcatcactgcacctgattacctcacaggacagataatcacttttgatggtggctggatttaaaattgtaattttaattttcgtattttttagatatttgttgatttttgtaattattgtgttacaattcacttatgaatagtataaataactttctattagaaaagcaactatcaaccattagtacaactgtgcctgacaggcttgattatctgatgaggctccacaacttgaccaacattgctctttctgaaatcatgtgctgtgcagaatcaactatttcaggctacagaacaggccgtagagtgcctgacatttttgtcatttgccatttaagtacaatttttggtgtcacacccaattattttcttggattcacagacgaaatttgtccaactcacaactgattatgtgatatatacaaggccttccggtatcacttcataaccatcacaggctactgatgcaaatgtcacataaaatatattgaaaaatgaaagggggaaatgttacagtctaagccaaaaccgtaacaaaaaacagcccggtgcacatatcacaatgtgttccgggctgtttttttgttattctgccacaagtattatcgtggtccttgcaggaactcttatggtgttgacacccaaaagctctgtctttgccgtgaagtcctctccgtcaaaatactctgcattggtgttggtgtccacatgccagtgttttccgttcggaagcaccggaagctgcattacaagcggctcccaatatgcattcatgcaatagaatacaatatcatcctccgtgtcctcctcatttcttccggcatacatgatgccgataagctttgtcttgtaatcagtcgaggcattgaacggtgtaccgttgtgcacactgatttccggaaactggcaagatgaaggctttgtcatctttctgagtataggatgctctttcctgaactgaatcatatgacgcacgaaatcatggatttccttgaattcctcaagcctgctccagtcgagccatgagatgatattgtcctgacaatacgcgttgttgtttccaaactgggtgttacagaactcatcgcccgcaaaaaacatcgccgggccacggctgcacaaaagcgctgcaaatgcattctttataaggcgccttctaagtccgtttacatttggatcgtctgtctcgccctctgcgccacagttccagctatgtccgttgttgtctccgtctgtgttattccagccgtttttctcattgtgcttttcattgtatgagtaaaggtcatacagtgtaaagccatcatgacaggtcaggaaattgactgatgccttgtgtcctctgctctccgggctgtaaaggtcgcgtgagccggtgatacgtgtgatggcatttcccgccataccgtcatcgccctttaaaaagcttctcatgtcatccctgtatctgccgttccactcagcccatctgttccatgacgggaagcttcccacctgatacagtccgcctgcatcccaggcctctgcgatgagcttcatcttgccaagtaccgggtcgaatgccagcgactcaagaatcggcggattggccataggtgcaccgttttggtctcttccgagaatggaagccaggtcaaatctgaagccatccactctgtactcaatggcccagtgtctcagacagtctatgataaagctacgcacaacaggatgattacagttcataacgtttccacagccactgaaattgtagtagtgtgcatccggtgtaagcatatagtacacgttattgtctattcccttgaaggagaagcacggtcccatctcatttccctcagcggtatggttgaacaccacatcaagaatgacctctatgccattttcctttaaagcctttatcaacgatttcagctcgtctccctcgtggttgtgctcctcgttgaaggcatagctggtattcggtgcaaaaaatgatactgtgttgtagccccagtaattgtaaagctgcacaccatcgaccactctcgcgctctccatctcatcaaattcaaaaatcggcatgagctccactgcatttattccaaggtccttaagatacggaatcttatccttcaaaccggcaaatgtacccggtgcgctgactccagatgacttatcctttgtatagcccctcacatgtgtctcataaatcacaaggtcctcaaagggttgctcaagctgctttatgttgccccagtcaaagttgctttttacaactctggctctgtactcaaaatccttgccaccctccggcttttctccccattttcgctgtccagtgaccgctctggaatatgggtctaaaaggacattttcctcgttaaacaaaagtccctttgccggctcataaggtccgtcaaacgaaaatgcatactcaaattcatccggctttatatcaaaaacaagcatggagtaggtatctcctatcctatatgaatcaggaaacggaatcctcgcatacggctttgatgcctgtggcttgaacaataaaagagtgcaccttgttgctccatgggaattgatggtaaagctcactccgttcgatgccacgcacgctccgtacattctgaaaaagcccggacgtatcttaaatccctctaccacatcaagcggcagcaggcctgtatttactacatcctcatgcttttcttctttactgcgctctctccacatatacatattgctctttgctcccttactatatttgtatgatggtacatgccatttgttgcatgactgctttttatcttaattcgtaaaaaatgatattgtaactattcagcccttctttttctcagtggttctgaatagttacctactgttaatttacatgcagctttccaagcccatcaatctctatattactacaattttgtgaatatgtgttcattaaattgcatatctctttggctttttcgcccgaagccactgtcggtctgaaatcattgtatgagcttacgctgcttaaggtgcatggaataatctgagcatctatgcccggctgcaattcaccatttatcagagtaaatgcctgctgataaatcgccgtgttcttgtctgccggatttttattgcctccgaagcagaaatttccaagactgtagcatatcattttgccgttatagacctccatcccctgcagtacatgagggtggtttccgactaccaggtctgctccccagtcgatgatacgatgtgctgccgcctgctgatagtcattagggtaatggtcaccctctatgccccagtgacagcatgcgataactatcgccgctccctgattgcgaagctgagctataccgttttggatatatgcctctcggtcaccgttttgtgacaaaaggctgaccgacactattccaatccttgtcccatcagccgtctcgtaaataccggtatgatcattgaagccatacactatcccggcattgtcgagcacatttctcgtatcgtccagtccagcttgtccatagtcgtatgtgtgattatttccaagactacaggcctcgatggagctgcccgtcataattccgatgtagctaggctttcccttaaggttccagcgcttttctacgcgctccgtcgcatccgatagcacacactccaggttgatgagtgtcatatcgtcagcctcaaaaatatctctcacgctgccgaaaaagtagtcctgtccctttgagtcataataagaattaaagctgccgtcatagctttgctcctgattgttgccgagtgtacagtctcctgtagccgtaatcactatggttgacatctgtggctgctgtttatccgcttctgttgcctcagctttggttgcatcagactgtgtactctctgtaccttctgccgtactgtcaactgcgttatcctctgcttttccggcatccgatgtgtctctaactacatcaacgccattccggttagaggcttcctttatattatctccaatatattcttttcctatgagcgctcccgccataatgatgcataaaaccaaaagcacacataatagaatttttaatcccttgtttttcataatttttcctcatatgtaatcttatactgtgttgtatttgatatgttatattatacttttatgttattattccggcataccccgtcataataacagactttattcaaaaaatcatacccttagaatatcaaccgtgtgcgcacttgctcccatcaggtctgctctctcacatgttgaaagatgatactgtacaaacatatcaaactcttcctcgtcaagagcattcaaaaatggcctgatataatttgccgcgccatcggctgctattatcttttcgcgtgtaagggctgcctgtgcatttaatgcctctatatcttccaatcggacaaaactgtacaaatcattagctttttctgtacaatggaagctctcatcgagcattccaccctctatgccctcttttatatgcttctcctttatggcataggttatcacgctgtactcattcataatgtatgccacaagtatgtatccacccggttttgtcaccctttttgcctcattcaatgcggcaagcttttcctccgccgacttcagatgatacataggtccgaatacgagtgtgaggtcaaattcatcgtttccaaactttttaagctttgtggcattgccctggtatgcctttactttatcgctcttttgcctcagcctgccgaggttatgcttaactaactcgagtgctgtcacatcatagccctcctcggcaagaggcactgagtatctgcccgttcccgcaccgacatccagtattttgatctgtgagcgaagatcaagctgcttctcattcatcaagctgccaagacaatcgtgtatatacttcatggaggtgataaactctaccctgccgtggcggctgttcaggcgcttttcctcgttgaatttgttatagtattcttctaattctgtcacgtatattcctccctgtattattcctcgatatgctcacgtccctgcgcaatgattgtgcgcacatgtccgtcggcaagcgaataaaacactgatttgccctcacgtctgctgttcacaagcttgtttgcctttaatatcctaagctgatgtgatatggcggactgtgtcatgttgagcacttttgcaaggtcgcagacgcatacctccgcttcaaacaacacaaagaggattctgatccgggtggagtcgccaaataccttaaaaagctctgcaaggtcgtagagctcggtttcctccggcattgtatcatttactattttcagaagatcttcgtggatttcgttgcagtcgcagcattctatctgttcatttatgttttcgctcatgatggtgtcctttctgcgttattttttcattatttttgcgttatttttactttattggctatggggcgggtgctccgcataaattgcatgtgccttcgcagttacggggctggtccggatgcgtgtgggggcactgcaggaatttacttagcttttgtttattagctattgccgtttaattgtcttttgttactgtcacactttcgtgtgaacagtaacttcttttattatacgcgaaagacagagtgcacctcttgggtgcattctgtccggtattttttatatagtagttttatggcattttgatatctgcattttgatatctgcattttgatatctgcattttgatatctgctctttgagctctacctttttagagcttgtgtacgaataatgcgcggattgcatttagcactgctatcaccattactcctacgtctgcaaatatcgcgagccacatattggctattccgactgctccgagcacgaggcagatcagcttgatgcctattgcgaagtatgtgttttcatatactattcgcaggcatttgcgcgatatttttattgcttttgctatctttagcggatcatcatccatgaggacgatatctgcggcttcgattgctgcatctgagcccatggcgcccattgcaattccgatatccgctcttgagagcaccggtgcatcgttaattccgtctccgacgaaggcgagcttttctttgctgccctttttcgcaagcagttcttctacctttgctactttatcacccggtaatagctcactgtatacttcatcaattcccagctcggccgctactgagtcggctactgtccttgaatcgcctgtaagcattattgtaccttttattccggcttttttcaatgcttttattgctgccgctgaggttggttttatcttatctgagataaggatatagccctcatagctgccgtctattgcgatatggactatggtgccgaccttgtcagtttcactgtagcttaagcccagctttttcataagcttatagtttcctgccgctacagatatgccatctacctttgcggtgattccatggccgctgatttcctcaatgtctgtcacgcggtttctgtcgatttcctttccatacgccttctgtaaacttctgctgattggatgcgatgagctgctctctgcaagtgctgcgtactcgatcaccttttctctatcgagcgtattgtcgtagactcctgccacctcgaaaacgccctctgtcatggtgccggtcttgtcaaatacaacgtatctggtctgtgataaggtctcaagatagtttgagccctttacaagaaccccctcgcggctggcgcctccgattcctgcaaaaaagctgagcggaatactgatgaccagcgcgcacggacagcttattacaaggaaggtaagtgctctgtatatccagctgccccactgtggtgcggctgacatgaaaagtattctgacaagcggtggcagtatcgcaagtgcaagtgcactgtagcagactgccggagtgtaatacttggcaaattttgatatgaagttttctgattttgatttctttgagcttgaattttcaacgaggtcaagtatctttgaaaccgttgattcgccaaactctttggtggttttaatctttaaaacaccggacatattgatgcatccgctgattatctcatcaccgcattttgcatccctcggcacgctctcacctgtaagcgcactggtgtttaatgtagatgaaccatcaactatcacaccgtcgataggaaccttttcaccgggctgtaccacgattactgagccgataacaacctcatcaggatcaacctgggtgagctttccgtccacctcgatattggcatagtctggtctgatgtccatgagctcgctgatattcttacggctctttccgactgcatagctctgaaacagctctcctatctggtagaagagcataacggctatagcctctgtatagtcaccattctcataaagtgcaaccgctatcgcacccacagtggcaaccgccatcaggaaattttcatcaaatacctgcttgtttttgattcccttaaatgcttttttcaggatatcgtatcctataaccagataagggaccatgtaaagcaggaacctgataatccccttaaccggtatgaaatgtaatataatcatgagtaccactgcgattatgatacgcgcaagtacttttttctgctttttattcatacgccatagctccattcattataatctcttgataatcgcccttactatagcgcaggcattgaaataataacatttgtcattcctgcgcccggcaatttataagaaaatctcgcagtcgtcctctacctttttacagttcttaagaacctcctgcataaccgcctttgcatcctgtccctcttcaaactcaacgctcatcttgagtgtcatgaaattgactgtagcatcctttacacctgctgtattctttgcggcatcctccatcttgttggcgcagttagcgcagtctacatcgattttgtaagtcttcttcatagtggtgttctccttattttcatgaattatttgttttactgtacgtttttattgaacatatgaatgattgttcatatgttaattttattatagcaccttttgcactgttgtcaatacacaatgtgcatctacacaaaatttattcacataccctaatcacataattaatctcatagtttatgattcaggcttcatctgtgatattttctttccagctgcttccctcttctatcccatttgccgtaagccattcatcctcaacctctacatgacgctgtctgccgttttcgtcctcgagataaaccacgcattttgcttttgcgccatccgctctttcctcacagccaaaatcagcctcatatatgtgtgttaccgtatacatcttcactctaccttctttcatatgattttgcatgacataaatatatagaaacttcccacatgtacaggtggatgtatccactccaaaatatcatgtgggaagctgtttatcaactatatttattacttgccgaataaataattatccggttaattataatgctgctttaatcgctgcaagcagctcatcatatgtctcatatgcaggaagctcagggtagtccttcttgatggcatctgtgcttctgaaaaggaaacctgccttgctggcctgtatcatgcctaaatcgttgtggctgtcaccgcttgcgatggtatcgtatccgatagactgcagtgcctttacagttgtaagctttgactgctcacatctcattctaaagcctgtaatctcgccatcttcagcaacctcaagctcgttacaaaagattgtcggccagccgagcttcttcatgagcggacctgcaaactgtgaaaatgtatcactgatgatgattacctgtgtgattgaacgaagctcatccaaaaactcctttgcgccaggcattggatctatctttgcgattgtctcctggatttcttttaatccgagtccatgctcctttaaaatatttattctatagttcatgagcttatcataatccggctcatctcttgttgtcttttcaagctcaggaatgcctgtctcctttgcaaatgcaatccagatttcaggtaccaatactccctcaaggtctaagcatacaatattcattttgattcctccgtgtgttttattctgtggatttcgatgaagctcaatatacttgtcaggtaactatttaagcagccttgaatagttacctgatattcagttcaccgatttaatccagtaaagtatatcatacaagccgacggtctacaatagaattatacgtgattttcaaaggatttttcagtaaatcattattaccgtccattacgctcgctggcttttgcacgcgcaccggcttccgctgagaagacgccctcatcatctatgatgtttccgctctcaacatgctttttcaggatattgttaaacgcataatcccagattttctctgagccaagtgctgtgcgcttatttctgccgagtatctgcgacagctttacactgtgctcacgccatgaaagcccgtccgatgcatcgtttaggagcattggctggatattgtccatggtgcgggcaaatctggcttccggtgtctgctgcgcctcaaattcctcccacaactttaaaagcggctcgccctgttcctttggcaagagtccgtatatacgctccgccgccttctgctcacgctcatgctgtgtgaccttgcctgcctcatcataggcatatgtatctcctgcgtcaatctctactatgtcgtgtatcaaaagcattcctactgtctttagcacgtctatcttctcattggcatactcgctcaagagcatggtcatgatagccatatgccaggcatgctccgcatcattttccttgcggctggcatcagctaaataagtctggcggaatatctccttttccttgtcgatttctctgatgaaatcaagctgtttttctaatctttctttttgctgcatcattttacttgttccttcttcctatcctatccgatttttaaatatggtctcaagtgtttaatcaattcatgtacttttgtgcctggagctgaacttgcaggagtttttccttcattcattgcatccaagcgttcagcatttgttattgcaaaatccatgaaaggttttaaactcattgccaatctcctcctgccagcatatttgtaagatatggatctgcaccataacgcccttccagatattgtttatcataggctgcagtactatttactcgttcattgttttctcttctgatttcatatagggaatatatttcactttcgtgcctttcattttctgccgcaaaccaaatttcatcccgtctgaaaactgtatttttcattgttgtcatatcatgggaagtaaaaagtaactgcgctccctttttgtttacattcttattcttaaacaatgaaattacataacgaagcagcttaggatgcaattttgcatccaattcatcaataatcaccagccgaccttcttgcagtgctaacaaaatcacaggtaatgccgcaatcattttctttgttccatctgactcatcattaaaacttaattcataaatctttccctctatcatacgctgtgtatacagttcatgattttcttcatcataccgataacctgatacatcaatatcaacatcatttagtgcacgaacaattttctttcgatatgattcatcatcagaaaacattatttgtctgtctgcaatcggatttgcatagtttttgacaatgcatgattcaaaccacttctgaacttccacaattaccggtatatcatagttgattgccaaaaaagataaatatggcatcttggggtttaccgagcggttaatactcgctttattgatgcttgcacccaatgtaatttcagcaccttccctatcaaaaaccatacccgttctctttccaccaatggatttccaatacagagattcttcaacaatgtcatccccgcatattgataagttgtacctgtattcattttttccctgtcggaaatacacttcaaattctgtcggcatttccctagatatttcattaaaatagaatggtgccgcacttatcttctgctgaataataatcttttctcttgccttctccaattcatatatcggcttaaccactgtagaaatcaaacatgaaagagctagtaacagattggtttttcccccaccattcggaccatatataacccctacgggaagaagtgcatctgctttctcgctttttaacaacgattctgaaaactccggaatagatgttgcctgaaaatcgaatgttgttgtttctttatatgatttaaagtttttaaaagaaaattgacacagcatcctgatattcctccctctgaactgtcttatttgcacttattagttttgcacttattatataattaatatattcgtttttcaagttttatacccacatttcataaattttatttttgaaatgtgggtataaaagtcatttttctgattttataatattattttaagtttccttagaaaatctcctttatatacataaaaatacaatgcctctacagcgcatccttcattgctttaacatactcaccgacatactttggtgaagcctcaccatactcatcgattatcttgatgatggcagagcccacaatggcaccatccgagatatctgccatcttctttgcctgcttgggtgttgaaatgccaaaaccgatagcacatggcacatctgtattttctctgattaccttgactattgaagccagatctgtcttaatctcgcttcttgtaccggtgactccgaggcttgaaatcacatagatgaagccggttgcctcctttgctatcatcgcaatacgatcctttgatgtaggtgcgataaatgaaataaggtccacatcatatttctcgcagagtggtaaaaactcttccttttcctcatatgggatatccggcagaatgagtccatcaatgcctatttccttacatgcactgataaacttttctgcaccgtatgagtaaaccacatttgcatatgtcatgaaaaccatagggattgtgacatcttttctcaaatctctcacaaggtcaaaaaccttgtctgttgtaactccggcttcaagtgcctttatgttggcgctctggattacaggtccctctgctgtaggatcagagaatggaattccaagctctataaggtctgctccgtttgcaacagcttctcttacgatttttgcagttgtctctaaatttggatcaccacaggtgataaatggtataaatgccttgccgttttcaaacgcacttcttatcttactcataaatattctcccctctgtatcttgctattgccgcgcagtccttgtcgcctctgcctgaaacagtaacaacgattatcttgtccttgtccattgtaggcgccagcttcatggcatatgccactgcatgtgaggactcgattgcagggatgattccctctgtctttgcaaggtattcaaaagcatttaccgcttcatcatctgttacaggtacatactgcgctctgccgatatcgtgcagatatgcatgctccggtccgactcccggatagtcaagtcctgcagaaatagaataaaccggagcgatctgtccgtatttgtcctgacagaaatatgacttcatgccgtggaaaataccaagacggcctgtatttactgtggctgcagtctcaaaggtatctattcctcttcctgctgcctcgcagccgatgagctcaactccctcatcctctatgaagttgtaaaagcttccgatggcatttgagccgccgcccacacatgcgataaccgcatcaggcagtctgtgctccttttcaagcatctgctccttgatttcctttgagatgaccgcctggaaatctcttacgatggtagggaacgggtgtggtcccataactgagcccaggcagtaatgtgtgtccgaaattctcttggtccactctctcattgcctccgatacggcatcctttaacgtggctgtgcctgatgtaaccgggataacctctgctccgagcagacgcatgcggtatacattgagcgcctgacgctttgtgtcctcctcgcccatgaatacaacacattccatacccataagggctgcggccgttgctgttgccacgccgtgctgaccggctccggtctcggctatcagtcgggttttgcccattttctttgcaagaagtgcctgacctaatacgttgttgatcttgtgggctcccgtatggtttaaatcctctcttttaaggtatatttttgctccaccgagatcctttgtcatcttttctgcgtagtacagtctcgatggtcttcctgcataatcgttgagaagctctgtgagctctctgttaaattcaggatcgtttttgtaatgattgtatgcttcttctaattctttaacggcattcatgagggtttcaggaatgtactgtcctccgtgaataccaaatcttccgtttggatttgtcatgatgttttcccttctgatgtatatttttaaatattttgttttctgtactgaatagttacagatattcttaaaaccatgaagatacttatatatctctattagcttaatcgcaattcatcaagcttagcctttttgtcgtccgctctcatcagtgtctctccgataagcactgcgtcagctccgatttcacgtattgccctgatatcatctgtgctctttacaccgctttccgatacaaatatgatgtcatccggaatcaggtcacgaagctttctgctgttagctgtatcaactgtaaaatccttcagattgcggttgtttacacctattattctggcaccggctcttaccgccatccctgcctctttttcattgtgtatctccacaagggcgcttatgccaaggctgtcacagatttttatgtattcaccaagctgcacctctgacagtatggagcagattaaaagcaccgcagcggcaccgagtgtctttgcctgatatatctgatattcatcaaccgtaaaatcctttcggatgcacggaatcgaaaccattttcgcaatctccctaagatactcatccgagcctaaaaaccatttcggctctgtcagtaccgagatgcaatccgcacctgccgcctcgtattcccttgcaatttcaagatatctgaaatccggctctataagcccctttgacggcgaagccttcttgcactcgcatatgaagctcaagtcatcctttttgagtgctttttcaaatgcaaaatcacaaagcttttcgtttttcgtctgaatcgcgatatttttcatttcctcaaggcttatttttttcttgtcctctgccacgcggggccttgaatattctgcaagctggtctaaaatattcatcgcttttcctttcctgttttgtgtgcttagctgttgcttacctcaatgagcttatcgagtgtttcaagtgcttttcctgaatcaatgatttctgctgcaagctcgataccctctttcatgctgtcggcctttcctcctatataaagtgacgcgcctgcgttcatgagtactgcatttctcttattgcccttctgtccgcctaaaatatcacgtacgattttcgtattttcctcaggtgtaccgccttttaaatcctcctttgtacagcgctcaaagccgaaatcctccggtgagattactgtggttctgaaccatccgtcctttatctcgcataccttggtcggtgcgctcatggaaatctcatcgagcttatccatgccatatactaccattccacgctttactccgaggcttacaagcacctgtgcaagcggctctacaagatactcatcatacactccgagaagctgcatggccggtgaacccggatttgtgagcggtcctaaaatattgaatacagttctaaaaccaagctcttttctgataggtccgacatatttcattgatgtatgatatttctgtgcaaagaagaagcacatgccgactttatttaaaagctccacacatttatcagggctctggtctatgttgacgccgagcgcctcaaggcagtctgctgtgccgcataatgaagaggctgccctgtttccgtgctttgccaccttcatgccacctgctgctgcaacaagtgctgaggttgttgaaatgttgaagctctgtgcattgtctccgcctgttcctacgatttcgaacacatccatacctgttttcacctgtaccgcatgctctctcatggccgctgcacagcctgcgatttcgtctgttgtctcagcctttgcactctttgttgaaagagctgcaagaaacgctgcattctgggttgatgttgtctcaccgcccatgatctcattcatcactgcatatgcctcatcatatgtgaggtcttctttgtttacgatttttactatggcttctttgatcatgattatgtcctcctgtattccggtaatatttcgtttataattttgtttatgattttgttctgctatttgttttcaattcaacaactaatatataaattcattaaacgctgcaattttcaattaagctttgataaaattactaagcatctgctttccgtccggtgtcatgattgactccgggtgaaactgcactccgtatatcggatattccttgtgctcaacagccatgatctcaccatcatctgtagtggctgtaatctttaggcaatcaggcatcgtgtccgcatctgcagcaagtgaatggtaacgtgctacctttgcttttttcgggcaacccttgaataaaaggctttctgtgtcaaacgatacatccgattgctttccgtgcatgagctcctttgcatatgtgactgtcgcaccatatgctgcgcatatcgcctgatgtccgaggcacacaccaaggattgggatttcctttccaagctcctttgccacagctattatcacgcccgcatcctcaggccttcccggtcccggtgataatatgatgcgatcaggctttaaagccctaatctcttcaactgtcatctcatcatttctgattactctgatatcaggctctatctcgccgattagctgatacagattgtaggaaaagctgtcgtagttatcaatcagtaaaatcattcttccacctcctgtgagacttccagtgccttaagagaagcctttgccttgtttatgcactcctgaaattccttctcaggatctgaatccgcaactattcccgctccgcttctcacgaaaaccttgccgtttttcttgtaggcaatgcggattgcaatacatgtgtccatgtttcctgtaaaatctatatatccgatcgcccctccgtaaatgcctcgcttgttgtcctcaagctctccgataagctggcacgctctgatctttggtgctcctgaaagtgttcctgccgggagcactgcctctattgcatcgagtgcgtcgtactcttctcttatctctccacgcactgtcgagcctatatgcatcacatgtgaatatctctctatggaatgaagcttttctacttttacagttccgaatttacttacctttccgaggtcatttcttcctaggtccacgagcatattgtgctctgcgagctctttttcgtccttaagcagcccttcctcaagctttttgtcctcctctgctgtggcacctctcggcctcgtgcctgccagcgggaatgtgtgaagcactccattttcaagcttcacaagtgtctccggagatgctcccgcaacctccacatcggttcccgaaaaataaaacatgtacggcgaaggatttatcgttcgaagcacgcggtaggtatcaaaaaggcttccctcaaacggtgcgctcaatctgttggataaaactatctggaaaatatccccctctttgatatggtgctttgccttctcgaccatctcacaatactgctccttatcaaaaagcggtgtgacctcacccagcagcttgccacccatattctgttttttctctccgtgcatcagaagctccctaagctgctttagctcaacaatcgctttgttgtagcctgtttccggagcatcaagtgacatatttgcgattagtattatcttttggcacagattgtcaaatgctattaccttatcaaaaagcatcagatcaacatccttgaaatcctccgtgtcccttgcttttcctctgatgcttttctccttgtagcccagataatcatacgaaaaataacccacaaggccacctgtaaaagaaggcagataatcaaatttcggactcttgtactctgaaagaatctgtctgatgtactctgaaggattttccgtctccaccgaaagctttccaagcttcatgtgaccatctatacagttaatctcaagctttggatcatatcccaaaaatgtatatcttccccaggcttcattggcttgtgctgattcaagcagataacaatgtgttgaaacattctgcagaatcctcatagcctctataggtgtgataaaatctgataatatctcacagcttacagggagaatgtcatacttcccggtttttgctatttctttaacttcggtcagtgtaggtgaaattttcatatgcttacctccaaattttgtgtttgtgtgaacaaatgcccaacatacagctcgaattcgccttttcaaggcttctccgcagcttgcgctgctacaattctcgctttatgttgtgcagtccaatgtacgttcgcaagcttgcatgcgagcatgcagacttgcaaactccattgtccctctttgttcactaaaaaacgcccttgacagaattttagttctgtcaaggacgaataatcttaactatccgcggtgccaccttgaattcacgataaagctcgtgcgcttggcaggataccaacatatcccgggcaaatgacgtatgcccacacgtcgcagaatactctggatgaatgataaatccatttgactgcgccctcagcggtccatttgacaacttgtttcacacctgattctcagcaccacaggctctctgtaaaggcatcattgccgttatctccgcttcaacggtttacaacttattaaattgtcgaaacagtttaaactgttttcacttctttaacgatttaatactttatcttgctaaatttgtttagagtttatcactcctgtttgtgtttgtcaacatatttttgccccgtttttctaattatatacattttattattttcaaaaaccatatttaattgcattctgcataaaacatattcccccattatttgatatattttgcattgacatatttcgttgcccttgcctgccccaatttcataacagaacctgtttttaccatttttccaagcactgcttctactgtagacggactcacatcaggaaggatatcacagatttcggcttttgagaccggaagcacgctgtttaaaactgtctgctcaactctttctgtttttttaagttttttcccatttacagtagaaaatcttttgtccaattctttgtaacatttatagagcatagacagaaaatttttcatatattcaaaatatgaattctcatttgtatgccatcctatagatgactcctgcaatgcctcgtagtaaaaatcctttgagtcattgatttgttcctcaaaggatacatattttccaacatcatatccacttttataaagtaaaaacaatgataataatctggatactctgccattaccatcagaaaacggatgtatacataaaaaatccaatatcacacatggaatcagtaacaatttgtttatttttgggttatcccttgcatccatatatgcaagtacaagctgctgcattgcttcgcctgtatctgccgcagaaaccggtgtaaagcgaactctacgtcttcctctttcatcaatctccattatcagattgtcttccgttttgtattttcctgatagctcatatcctgcaagatttgtcatcgtttcatgtatatgcagaatcatattttcactaaatgacatctgatcatgcttagaatgtatctcatccagtgcatccctataccctgcgatctcacgctcatcatgattaagaggagcactgtcaccgtcaacaatctgctttatacgtgcgtctgttgtaacaataccctctatcgcattagaacctttaacagattgtactcttgcaatcttttccagctcagtatatatacttttattgctttccttacgcgtatctgatatagcattaaatgcagtaattgttgctgtaagattaactatctcagccggtaataagccctcatctaaaaaagaatagtcaaatatatgcatattgtcctcctgttatctgcatatattttatcaaaaaatgtgcagatgctcaatcagtatctgcacattttttaaataatattatgcattaaaatcgtaaaccggtgtgtgtttgcacattaataacataaaatcgcctcgcattatataaattcgattgataaccttattatagttgttattagatgtgtaatcactcaaaaacaccgactaatctaaagtctgattttagattagtcggcattctggttttctataaaatatactccatctggcgttcctttgtcttaagccccatcttctcataaaatttctcagcagatgtgtttccgctccatacattgagagtgacctcgtagcagccgagatgctttgcctcattcttgacatattcaaaaagctgctctccgatatgctgtcctctggtctttgcatctacacacagatcatctatgaaaagcgatgtaaacggtaccatattgttggaaaacggctgctgtcttatctggcagaatgcatatcccatgcagatatcatcatcatctgccgcaacatatatcggctttgtatcgtcctttatcatttttgcaagctcttcatttgtatattttgtcgttcccgggataaaaatatccggtctgatatcggcatggatctgaagcacctgctctaacaattctataagtcttggtatgtctttttcgtgtgctcttctaatattcatttttgagaatcatccttcctgttgtcgttaatgtatagtttttatatttcaaaataaatccagcatattatcgagataaatgtgctctctgacatgtatctgatactgtggcttcgtcatatagtaaagcagaaattcaagtatcatggcacttccaagccctctgccctctattttaaaattgctaaagcccatcggcagataagtgttttttatatcatctattccgataaatcccggattttccatcgccttcgaaaagagatatccctgccctgcatcaggtgcagtgcaataatgctccgggcaatcctcgcccagatttttgcggctaaccgtctcgtagcatttcttcctgtccgtgcagccaaaccagcagcactcattgcacaaaaattctactttatccttttgatgctgtgataattctttcagtttatcaaatgatttgttcaacctgaaatccggtaccacatagcggaaatcctttctgtttagctctttttcaaattcacaaaaatccgtcagaacctttgttgttgaggatataaaataaaagtcagggtaattttcttttatgtaatcaagcagaatatctgagtagatgattatgccgtttccaaagcccctgcttcgctcattatctctgcctatatcaaatatcctgcacagttcgttacattttttgtcagaaagatgctccttagtaagcaatgaattgctaaaggtaagtctcgcggatatcccatattcctgcataagcttaagcacttccttcggatcgtgctcaccaaaaccgacgcggcctccgccccatatgcagtctgccggtgcaccgtatattgagcctatgtcgcaccagtcatagaaatattcccggtgcttgcggtacagtgggagaaattctttgtataattcataaaattcaaacaatcccggtagatgataatacgctttcattttgactccttattataatctgctgaacctgtgctcattttaataattttcaatcacatattcctcaaaaagcggtagcgtaaaatacacatatccccgtttctctcccgatacaattccctttcttataaggcgcttacggtacggattgaattcgtttgtctccatcccaattgcatccctgatttcttttatttttccgctttttatatctgcaatcccctttgcaaccatgcgatccttctgagaaagctccgaccagattttgtcatatacaaattcgctcagatactgttcatactcgcccaaaatgccattgtagtcaccatcattgttccacgtcagataccctaaaacctgaaatgcaaaaggatagcctttggtcagtcccgccatctgtgctgctttctccggagatatgttaaaaatagtcttatacttattgattattgccgcgttatttaatggtttgagctggattttaggtgctctgtacaaaaatgtaaggctcttctcattctgaagctcctctatattttcatacaatcctgttcctaatagaaatacaggcagctcctgtcttacaaatatctgaaaggctcctgcaaaaaccttcatgtactcactatttgtcatctcatctatcgtaataagcagtctcttaccaccctttttaagcctttccaaaatctttataatagctgtctctgcatctgtaatcggctgtgtcccctctatagatactccaaaaccgaaaaatgatagatcgagctttgccgattttataagtcccgcacatatattatcactattcaattttgaaagcattgcagacaacaggtccgttgccggattgagttctataaccacccagtcatcattttctcttagtttatgcgaaatttctgtcatcattactgtttttcctgaacctcgcacaccggtaattataaacatctgctgatttattgtatccgctgtaaaattctcaattatctcattaatctgtaccggacggtctaccgactctagtggacttcttccaaatgtaagcgtgaatggattttgcatatcagcctccaatttttactgttgtttactgttttgaatttgttttactgtcttttactgttgtttactgttttggtttcattttactgttgtttactgtttatgtcaagattacagttaatgataattcgtatcatataaaccatttatgctgatttgcatttttgtagtaaccggttgccgttgtaaaatagttactggtcacactgtcaggcatgaacagtaacataaaataaatcccggagcgtattgtatgctttgacagcatatcaatatcacgctccggggtttctatttacgcctgatttagtttaagaaattctgtatgataacatcctctgcctcttcctctgtaagtccgagtgtacggagcttgagaagctgctcgtcgtttatcctgccgattgcagcctcatgtatgatagccgcatcgatattttttgccctgatttcagggattgaaccgacctctgcatgatccatgatgatagaatcacactggatatgagcctggcatttgctgttgccgatggcatttggatggaaggtctggacagagtttccttttcctactgatctggaaacaatctgcgcagagctgtcctctccgtttaactgcacctcgatgttcgactccgccttctgctctccatctgtcatgagacgctctgtgacatagagctttgcgtcctttccaagctccacattggtctcacggactgtagaatcaacaccctttatctgtgctgtatcgagagtgaaaacagaattctcacccacaaatatatttgttacagggttgagcactctcgcacctgttccgtttccctcgccgtagtgcttttcctcatatctgacattcgcatttttgcccacatggaaggtatggatgccgtcgtgtctgctctcgttgcagccgctgttgtggattccgcagcctgccacaatccttacatctgcaccatcctctacatagaaatcgttgtatacaaggtctgtcatacctgatttgctgagtactacagggatatagacagcctctccatccgtctttccatcaatatagatatcaatgccgggcttgtccgtctttttctttatcttgatgtgctcgctgtctccgtggcagattgatgtgccgttttcacgcagattaaaggcacctgtctgactgaatttattatcatttatgacgtccaatacgccctctgttacgttgtcaagctttaccatattatgctcttccctccagtctctctacgcatttgtgacatttctgtacaccattgagataaggcagcacctcgtcctttgtgccgattttcttgatttctccgccatcaattatcatgatgcggtctgccatatttatgattttctcctgatgtgaaatcactatgaggctctgctttttctcagtatggatttcctcaaatttctgtatgagcattgaaaagctccacagatcgattccagcctccggctcgtcaaatatgcaaagcgaatgctccttggcaagcactgatgcaatctcaattcgcttcatctctccacctgagagtgtgccgtcaatctggcggtaaatgtaatcctttgcacagagtcctaccgcggtgagaaggtcacagcactccttgtctgaaagctcatcctttgcggcaagcttgagcagcttcatgacggtcattcccttaaatctcggtggctgctggaatgcaaagcctattcccgcatttgccctatgattgatgtcaagctctgtgatatcctgcccgtcaagtataatctttccgctgtccggtgtctgaatacctatcaatgtctttgccagagtggattttccacctccgtttggtccggtaatgacaagcatttctccgtcctctacctgaaatgatatattgttcagaaggcatttctttccgccctcatcatctacgtttaaagttaaattttctgctttaagcacgattttcacctcatttttatttatgatacagcataaaatccgtctcctgctgttcttattactttttccgtttaccgttcacattcacacattagtatgcccggcaatgattacagtataacataatagtaaacgtttacaaggtataaactctctggtactcgctaaaatacatattgtggctttttataaaaagtttgcttatctatttattatcacattttctatagtaccaacttcctattgatttttgtattctatctgtgataaactatcgacaattaatggtagttgcagcttagacagagcgagacgaaagtttccctctgtctattttttttgcgcttttacgtgcatgaagccttgtatacacttcaagcctttttcaattatcgcagctatcaagagtctattgtaactactcgttacagctatatttattttacataacaggaggatttaagaaaaatgccaaagaacagattacaggaaacagtttttaccatcatgatggtgcttgtcatggtttatgccatgatatgctacaatattgcccttgaaacaggtggtatgaagaactttgtttttaaggccgcattaggcgaatttcctatcatgattgttgccggttttattctcgatacattcattgccggaccacttgccaaaaaatgcgctttcaaaatagtcacaccgggaaaggacagacctattgctataatccttgcaatttccgtcttctcaatctggtttatgtgtcctatgatgagctttatcgctaccatccttttcaatggtggttttaattcacagatatttgcgacattctgtgagctcgtcgtaagaaactttccaatggccttcttctggcagctctttgttgccggaccacttgttagattcatctttggaaaaatcttccgagagaactaatttaaatgtaaaaaatgtaaaaccgggcataatagcctgcccggttttcactgttcatcgtaactgttaagaatcacaccttgcatattcacaaaaagctcattgcagatgtcttctcgcttcttagaaagcttcataaaacgctttgtcttagaaaactccgtctataaagcccttcatatcatccttagacacaagaccaatctgctgaccggcaacctgaccgcccttgattgcaataactgccggaatattcattatacgatactctcttgccagatcaggattctcgtccacatcaatattgtaaaactccacatctgtgatttcatcagaaagctgctccattaccggcgcaagcatcttgcatggaccgcaccactctgccgaaaaatcaacaatgatagccttattatttttaacctgttcaaattcactgctattaatcttctttaccatagttgttctccttccatctgtcgaacgaattattttcgttgcacccatacagcaataaaaaataactgctgtactagtacaccgaataagaaataacaatgcatcagaaacttattattcgatgtactagcactactataatacataaatcagattatgtcacataaaaatattataaaccgcaaaatttatcatttatcacgattaattctttttgtgctctgccatataggcctctatatcctctgtggttctgatgatatcctccgacagacacactgcaccatcctcggtgataagcacatcatcctcaatcctgataccgatttcccattcatctatatacagccccggctcatcactgatgattgcccccggacgaagcctgctgtttgagtcaactgtcacgtcatgcacatcaattcccagatggtgtgacacgccatgcatgtaatacttagaaatctctaccgaattctttatcagtccaagcttcataagcccgtctgcaagcacatccttacatacttcatttaattcctttgtagtcattcccggctttgcaacctcgacaatctttcggtttgcggcaagcacgatatcatatacctgtttctggcgctcagtaaaccggccatttaccggatatgttctcgtaatatccgaattgtagccatcgattctggctccaaggtcaagaagcaccagtgttccatcctccatcgtctcacgatttgtgtcataatgaagcattgttccattcattccacttccggcgattgtagggaaagctgtccactctgccccaccgcgtcttatgatatattcaaagtctgcctgtgcctgatattctttcatgcccggctttaaattagccattacattgcaaagtccgtcctttgtgagagcgattgcctttttggtaagttcaatctcatcctcatccttctgcatacgctcctctgccacaagtgggaaaagattcttcacagcaactcccggataatctgtcttaaattcattggcttttaccacattgtaatccggcaaatccactttctgatgacgatacgtgtcgaaatatgctgtgtatacatcctcacgcgtcattatcctgtccagcgtgctctcaagctcataaatatattctatctcatcaattcctgatatttcctcggcttcctccatagtcaccttcctgccgtaccagcgctccatcgtagggtccgcctcctctatgaagagcatcgtcttagcaggctctacacatttatccaggacaaggaccatgttgtcacgtctaagtccggtcagatagaagaaattgcggttagcctgtgctgtaaataaatcatactcatctgcactcacatggtgctcgatgcctgagtacaatattgctatagaattgtcctccatcttgtctaaaattctttgtcttctgctttcaaaatccattttgctgcctcttatttcatatattttttaaaaagtgaacatttcaacgtcagtttttcatcaatgacattcacttttatattcgtattaatctagttatatttatcatctgcattaatttctgacatatacccagcagttataatgcctgccggcaacgcaacgattgcaattccaaacaatgaactaatcattgtaagaatttttcctatgcctgacgtagcataaatatccccataaccaactgttgtcaatgacacggttgcccaataaatcgcatcaaaaaaactattaaaagtatcaggttcgatattaaacattacaagtgccgtcacaaatatgtatcccatagctagaaaagcaactattgtaagactatccttttgccttttaaataccctgacaagtatatcaatattttttgaatatctaaaactcttaaatactctaaacaccctaaatgttttaataagtcttgttactcttaaaagtttaattccactattaattatcataaaagaaggtaatatggatagcaaatcaattatagccatagctgtaaatggatattcaatataagaaacttttcctttaccaagcttataatctgctgtaaacagtcttaacatataatcaccaacaaatattattgttgtaatccaatccataacgttaaaaacaccattctgctccttgaatgctaatggtaccagactagcaatgatacacatcatcataaaaatatcatatgctttacttaacgaatcaccgtcttcacttacttcaataatcttatatattcttcttctcatttttctttatataccattcattaaactgtttcgctaataattttatactacttacagttgtcacatgtttatacatttcattcggttttatcttcattcagatgataatcatattagcattatctctgcaacatcttttatctaattcactcccttcaaataatttttcttatcattattttataataataccacaattcaaataaaaaaacaccccagaaccgaagttctgaggtttaacatattctcgatattctttgaaatcacctctttgagaacgttttaaaagcttgaaaatcccgaaaacaatggattacttacatcaaatgttgcatacgtgttttacactttagactactcagagcattccacgacttctctgaacttacaaattcgcatataaattttatcgatagaagctacttatgtccaaaataatctttgcaatgtataaccctaaaaatgattgtgattgtgttaacctcaatgctgaaatgtgaaattccattgatttttcaactaaacataaaacatcctatattttcagattttttatggaatatgacgcagttttattaatttgtatttacgactattgattcacctacatttttacagaaaactcaatatttatgcggtcatatcaactttagttgtaaatttactggaagctaatatgaaatccaagtctcttttaactttcaaaaatgcaatacttctgttcatctgaacgagccttctgatattggttatcctacaagactggccagaaaaatcccggggctgtatgccaaattagcttccaaagatggcggtttgcccggatatgtagaggtgattggggtgtttaattagggcatccctcgtaactcataaatctaacacaattcaatccctaactttaatccgcaaccataactacatatattgctatctttacatatattgcatttttgcaagtgtatatttctaaagtgttcaaactcaacgccgttccatatctcctcaatttgtttgttttccaatgatactctatattttcctagttgattatcaaaagagcacggatatgcattcatttcagcatcaatatacatcgaaaatcttcccgcttcacatgcatcaacggatgacatttctagagattcaccatattttattaatgccgatgtaaaacaagtatcaaatccaactctatagaaatgtttcttttttatagcagcgtccaaaaaacgtgccaatcgctcgtccttctttacaattttttctcttctacccaaaccaactggtttgtataatataaaaataatcgcttctattccaacaggccatatttcgttttccaatctatatgttgcctcatctattgaatcatccgaaaccacaaaatgaatattggttttgcatccactacttacaaatcttctaatcgcatcaattgttacatcattattttcttgatttgattctatccttgaataaaacgaaaccgctacagcaccacaatatttccttatataatttatttcctgttgcaacagagcatatccgctagttgtcaaattcggtacaattccatattccctagtcatggataatatttcctcaaaaaattcatgtttatttgggtcaccagctccgcctaaagcaacttgaaacactctatttttacattgcttcataatcgtctcataattttccaatgacatattctttttatttgaattaattgcattttgataacattcaacacctaccctactacacattcctgcctttgctgcactacattgtcccattattccgatatccaaaagttccggaaaagaacgcatagtagcattcatttgagttccagaaatatcacttctgatcaaagttccatttttttcattaaataattcaaagaatttatattttttatcttcatagtaaatcataaatttcaccacatacaacttcttgcatatacataaatatcattattatcaatttcaaaactatccgttgtaaaaaaacttgttaatgtaccttcatcactactagtgtaacccatataacccaaatatccctttttttgatattccaaatatctacttgcagctttttcaccaaatacttcttttacattatcataagtcacttcatcaaaattaaagtatctcaagcctttattagtcccatatataatattttcacacatctccattgctgctgattctattggcgaattctttttaaaacctaactttttatataaatattgtgcggtcaattctttttttgacaatatcagaaaatttgtagaggaactatttgtaacatatccaatcctaatcttcatattctaaacctcctacgaatccccaaaattgatttttcaactcatcatcatacgaaaaataatctcctacctgatcacctttccactctaaatcaacataatattttttgttacgacatactttccttgccagttcttctgacatattaaagcgacaaactaagtattgttcgcaattatcaaattcttttttataatatctgcgaaactccttcctataatttattggattaccaaaatacaaatcataaattcgcccaatcacctctcctgcataagagtttttcttgactttatacaaatttaaaagtcttgcctttgtaccaacctcatacagattaaagaaaagataattattaaatttcagattcgccttacttgtcctctgtttcaaaatatatccgtcctttcaaattacatataatatcctgcttgttgcaatgtgactcaaaatattcttgaatttcttcctttccttcccatgacaaaaattctaaatacaaaaataaataacatctaaatcttttacatccttctatatttttaaactgcaattttttgtctatttctataaagtcatcatgattaatcccatctatattccaatatgataccgtttcctttaatacactacaaaactcatcatatatatgtatctcatataaattttctaataataattccaaattatacttgccattaatcatttcttgatttattaaaaataaaaaaagtcttgccaattcatgacctggattattcattataatatattttaaataatctttttcataaatctccaagtcgtcatctccatctagaattactttcaacccccaactattcaaaccattttctctattcatcctatatgcttctattgcattatcatgcggtttcataaatctatttaaaatagttttacacatatcagcattatcttgtcccttataaaaccaatatatataatttataacaccttctgtacataccgcatttgtttctactaatttatcaatatatgtaattacttctttaacatctatccgttcaccatcatcaataaaactatttaatgcatatttagccacacaataatctctcagttcgtcaaacacaaaataaatttcttcatcatacttttcaataattgaattctcatgtaatattaattttcgactcactaaaatagtttcatccatgatgtctttgatagcccctgtcatttcgctttctttcattatttccgaaagtggtattgcggaatatttgttattgctatacatatgtgcaacaattttattcaagaaagcttcacactctggcttatttctttcgaacaccgcatcaatatatctttgaaaaatctcatacttgtttaaggaatttacattcacatcactgtttttatgtacttcaaagaacattctcattaacaagagctgactatacagtttttctttcgatgcttccgaaagctctcctgaatagttaaatgcttttttataattctcgtacaatcttttctttgctacatacgaatactcttctttcattatgtcataacaataagccccctcatcaattctatctatcaaaatatttttatacttaaaatcaaaatattcacttctgcacgaaacaataattttaacttttcgatattttaacatcttgtttatgaaatcagataatgatttcataaattcatgcgagcgactctcattaattgcatctatcactatatacattgacctattcaacaaaacacataaaatatgttgaatactccagtacactctaaaatacttgttcttacatggcataagactgttttcaaaataaacacacatattttgatttatttcttttacattatagaaaacacaaattttcttattattaatcattgtctctaccaaattgcaaagcaaattagttttgccatttcccgcgctaccagttaaaacaatatatttattctttataaattcagtccgtgtatatagtttttcaagcttttcgatatatcggtaccccaacacttcaaataacattgctgtgtctttataattctctggtgcttcgcattctcgttttcttattttcctcatcaactccaaagtgctattaatctcttcatatacttttttaattgatgccgatttacttatcttaaacgcaataccataatctttataaattttctttaatcttcttccattttcatcatcaaataaattgttataatctgcaattattctctttctccagctatcaccatgcatgaaatatcttaagagttctttggtatcatttaattccacaaacacaccctttatatattttccatttttttttaatgtatttatgttatgtttacttacatcctttgttcgcttcttaaaagtaaaaagaaacactaacataactaacacgaacacacaaaacggccagtaaaccaaacaatttgaaataaattcagcaatatttccaaacaatccatcattcattttttcaaaaaatgttttactttctacgcttccgctcatatccgtattgactaactgaaccaaaagaagattaatcattttataactctccttgttaagatatctgttatctaaaaactttatccattattccattctccatatcatcgatactataaatggtatccataacttcgaatgtctctcttaaattacctcttgcactcttccaacctattccatctgtaaaccacacaaatgtaaatccatctattgtatcagcctcctgcgaaagcatcttgtaacttcttgcagtttcattaagtttagaacctcctccaccgtagaagtttgtctcaatagcatagatcatcctgtcagtcttaattacaaaatcaaatcttttagctgcttttccctgatttgaaagtgccgacaaatcaatattccattttgtctcaatatcctttaaatacatctctttaaagtaattctcgttctttttaaaacctgctgccacaatgtacttctcaaccaaatcttccatttgatgtccaccacgatttttacgtccattagaatctaaacctgtttcaatacccagtgcataatctaccagattatttacaagatgatttgctatcatatcaaacaatcctgttttgctcataaataccttgtattgctctacctcatagttcatagttttgaaattgtataaaaatgctccatcttcatcctgtgcgtatatttcgttactcctgactgcaagtaataatggtatacattttaatgtttccggatatcttgtcactaccttttcaaactcatcttctatattctttgatccaattaatgaattcaaaatgttgagttctaccttgatttcatcaacattcttaatgaccttttcaaaatctatgtaataatcatagcttgaaatacttggtctgaatttactaagccattcgtcaaaattcctatttgtcatttagtaccttctccagtcttttcttagatatttccatatattcttcgcttacatctattcctatgaactttcgtccatatcttactgcctctaccccggtagttcctgagccacagaaaggatccaagataacttgtccttcctctgtcgatgcaaatattattctttccaacagatattctggtttctgtgtaggatgctttccctccaccttctcagatggctttgtcaatgagcctgtccaaacatccttcatctgctttccatcattcatttctttcattttctgataattaaaaaaatgccgagacttcttatcattctttctagcccataaaatggtttctgtagaatgtgtgaagcatcgacatgctaagtttggcggtggatttgttttctgccatgttatgttattaattatcttgaagccctcctgctccaatgccataccaattgaatatatattgtgtaatgttcctgatatccatattgtgccatttggctttagtactttcttacataacctaatccactttctattaaacttatgtttttcttcgacaccggttccactttctgaaagtttatcccatgagcctttatttactgaaaccatctttccacctttacatgtaatcccatcattacttaaaaaataaggtggatcagcaaatatcatatccactgattctggttccatttttgttagaattttaaatgaatcacctacaaccaactgtgattcatccgtctcaaagtataatggcactttctttgtaaataagttatccattatatttctcctcgtctttagagctaaatgttaatctctgccagcagagacattaacaccatttaataattacatattattacttcttctcctaccctatttgatgcatcagagttaatcatacgcttaacacttacaacatctattgtatagcctttgttaccatataaatcatttatcaactccgtattatgatttgtaagcatacagtaacatcctctttccgtcaattcatcataaagcctcgctaatcgcctatgactttcaatatcaaagccttcctttgtatatgattcaaacgaagtcggattcaatggagcatatgggctatcaataaatataaaatctcccttctttgctcccttacaggcttcctcaaaatctccatcaataatagttatcccctgcaaatatttagaaatatccctaatcgctccctcatcaacagaaactctccgactattattatacggaacattaaataatccttttccatttacacgatacaaaccattaaaacaatgcttattgataaacacaaacaaagctgccagctccacatcatattcagctttcatcagcttatcattgtaatgctcacggagagaataataatatttctttccatcttcccacatttctgtatcaagattatttaccgtcttcaaaaaagcatccggtgcatcacatatctgcttatatgcatttatcaaagccttgtttatgtcatttatcagagccttttccggtagcaattcaaatgcaactgcgcccccacctacaaatggttcaaagtaattattatatttctcaggcatacgctccttaatttgtgataaaagctgtctcttacctccagcccatttcacaaatggagcaatatttgagttactcatttaattttcctcttctctatgtccaatagacaatattcctttttattatactttgaaaccaataaaataacaacagtgtctttcacttttagtgaataaaaacaagtttatttttgaaaaacaaatatatattcatgcgccaacatcagaaaagaattattctgattctcccaatattttgttgaacgacaattatgctgttctttaataattatttctttatttaaaaaaccaacatttaaaaaacattccatcattctaaatcctaaaggaataacttttccatgctttctaacatcaccaatcatcaccgcacatatctttccctttttcagaaccctatatgattctgctgccactttattcattttatctaaaaatttatctacgcaaagtaatgaaatgtcaccagatattcctttactatacttgataatatcagcatatggtggatgagtacaaataaaatcaatactcttatcttttatacaatgtaattttgttgcatctccattttttgcaaatatctttgattttgtttcacattggaatttcaagtttgtttcagaaattaaaactgactgcggattaatatcaatacctaccgcattacgattaagtagctttgcttcaactaatgttgtaccactacccatgaattggtctaagatccagtcacctggtttagaatagcgaagtatcaaatttctcggtacatatggtgaccaattaccacgatacttccctgagtgtgttgcccaatcccccctgtctttaaacgaccaaacagttgtaggttcaagtgcaaaattatttggttgtaaagttatatgacattcccccttctccgttaatgttaattcattgtacaacgttttatgtaaaaaatccaccacttttttctttcacaataagtgaatttatatacttttcgaagcatgagataatattcacaaatagtgaaagaggtcttgctatgcattttgaatcagacacatccctgtaccatgttataggtgcaaacataaaacattatagagaacaggcaaaattaacacaaatgcagcttgcggaacagtcaggaatcagtatcagctatctttcaaaaattgaagctgccgggtgcgataaaagcctttctatatctgcccttaatcaaattgctaatacgcttaatattgatattattaattttttcaaggaggcaacacacaatgacatacaatgatatgcttaatttagtcttggcacttccctttgacacaatgaaagaagtttacagcaatggtaaacaatccctattaatttatcgtccaagcactctatccaaacgtttcaaaaactatgatataaatactaattttcagatttttcttaagataggcgatgataaacctttcaaaccaaatcatcttcgactacttattgatcttaaacttcgagctagagaaattcctcaatcaaggatagaactcttaactgcatttgataaaatattctatggtgcagagccattaaaagcgatttctccgctaacacatattaactttactcaatatattaatccaattgacatcacagcagtactcgcacaattattcataattgaacaaaatataggttatggcaacaaaagcactttcaatccaccatctctttatatccatggatggatacgtactttcattgcatctgaccaggaaattgatcaaattgtataccgaatttgtagaaacactcctcctactgtaaaatatacatgccaagataataaaaatcatcctgaatataaccctaatgctaaattattatggtacattaactaaatccatagcaagctgccgcatcatacgacagcttgccatctgtcctcatgcatctaccattcgacattattcctaatataatattctatatctctatcatatttcccaattctaaattttatttaaccataatatttttttcagcatatatccaaataagatcagactattttgtatttctataaagcatctagctatttccaatattcttattttgacattaaaaaagccccgaaaactcggggcttttgaaatatcaattttcttaatattatctcttgctaaactgaggagctctacgagctgctttgagaccgtatttcttacgctctttcatacgtggatcacgtgttaagaatccagcagacttaagaactggtctgtactctgaatctacctgaaggagtgcacgagcgattccgtgacggattgctccggcctgtcctgtgtatccaccaccacgaacgttaactaaaacgtcgaacttgtcaactgtctcagttgcaactaatggctggcgaacaactacctttaatgtctcaagaccaaggtactcatcgatatctcttttattgattgtaatctttcctgttccaggtactaaatatactctagcaacagatgattttcttcttcctgttccgtaatactttgtagtagccaatttactttacctcctattaaaactctaatgtctcaggcttctgagctgcatgtttgtgatctggtccagcgtatacgaataactttgtatacatctgacgtccaagaggtccctttggaagcattccctttacagcgtactcgataacgcgctctgggtgcttgttcatcatctctcttaatgttgtctctttcataccaccgatataatctgagtgatgatagtaaatcttctggtctaatttcttaccagtaaccttaaccttgtcagcattgacaacgattacataatcacctgtgtcaatgtgtggtgtaaagattgctttattctttcctcttaatactttagcaacttctgatgctaaacgtcctaatgtcttaccttcagcgtctactacgtaccattttctgtcgattgtagcaggactagccataaatgttttcatcggttttcctccttaaatgattcgattacttttaatgccgatgcctcttgaaatcgcgtatgtccggacgccacttcctttttgacatcttatagtcctctgctccatctcagatgactatcattatctatactaaatggttgccggggctttggcttccatttatctacttttacagacctagatattatacttgcgtaaccggctgttgtcaagtgttttttacccttattttcggcttattttcggctttttctttaagctttttctttaagctattttttgaaacttttcctttaagtttttctttatgtttatactttttttaaaactgcatatatacaaaatcagccggattcactcccggtccatagtaaccgaatattattactataaagatgccaaggtatattatcgcccagcgaagcggcagctttcttgaaagtatgaaatcgcgcatgtcgagctttttattttcctcaacgaagctgataaagaaccacagcagagtacatattataagtaaaagtatatcgtactcgtccagtccgcatgctccgagatttaaaatgatgttgtttattccaagctcgctgatatggaaatccgtgactgatttaaaaagcatgtgaaatgcagtcgacgcatttgcagctatgtcaaaatagtagcctaccagtatgagcataaaggtccaaatcactgatacaatcgttgcaaatatacccttttccctgaggccggtcagcttaaaaaagccgcctgccacctttttgtttaccggagcaaaaagctctgcaagcatgattacaatgccattccagagtccgaaatacaggtatttcatattggcaccatgccatactccgatgacgataaatgtgatgacactcgcgatgcagcccggcagcaccttactgatatgcgcaccaaatctcggctttagccatttgccaaagttcaggaaacgctttgagattgaaagcgggtagaagatatagtttctgcaccagtctccaagagtcatatgccagcggtgccagtactcagtgagcgagcgcgaaaaatacggatgattgaagtttgttgacatcgttatgccaaacatctccgcaataccacgcactatatcgattcctcccgagaaatccgcatatagctgcagcgcatacactactgccgcaaaaaatacataggtgcccgaaaaatccattggcttatccattacaaaattgatgatatttaccgcgcggtctgctatcacaagctttttcatgactccccagagcaccagaagcgcacccttttgcagattttcaagcctgagggaatgtccctcgtaaagctgtcccgcaagtttatcatatatcgcaattggtccctgtattatctgagggaaaaatgatacaaacagcgctaccttaaggaaattcttttcaggctcgacaatttccctgtatacatccatcacatagcccatggactggaaggtgtagaaggatatgccaagtggaagcaaaagtccaagctcccccgcatatggtatatatttaaggaatgccaatatgccgaaattgcaaagcagcgcaaaaagcatgactgccactctcttttttctgcccttttccttgtattcctttctggtctgcctgtcccagtcctccttatggctttttacgatggcattctgcttctttaacagcttgtcaatccatattgttgagccataggtggtgcatattgtgaaaatgataaacagcacataccacttacatataatcacatagtatgccatgcttcccgccagaagcacataccagcggtatttcttcggaaagcaataatatagtacaagcaatgctattacaaatatcgcatattttaatgaaatgagttccattttatttactccaaatctattttctaatgtaatactgccagacatactttaattaacaggcagtatttattttaaagtccatacactatcatgctattttttaaccggggtatttaactcctttgcaggctttgcatcgttgttcgtatctgctaccttatttgtcgcaaggcttgacgaaaaattataaggcagataaacggacatctcaaaataatgattgcccagactcagatccgtatcctttgcgcaggcacttatcaccttgtcagcgcgccttgcgcactcgccccatgcactctgaatctccggtgagtggtctgcattaagcctgtaattatcagacagatattttcccatatatgcagtgaatttgcggcttccatttatattcaggtgctctgaattgtagaaatcatccctctcattgattccgataaattccttatcgccttcaaagctcgcaaagtcatagccataagactccaccagctccttcacgtcacaaagcacctgcggattctttatctccttctcatgagggaacctcgcaaaaagcaccttttccaccccctgtgctttacaatactcaagcagatcagtcatatacgctctgctcttgtcggtaaagtagagctttttctgcttgcctgatggacaatcggaatattttgcaatagatgaaaatcccttcatgcatgatgtttttgcaaaatacattccaactcttgtggcaaaggtgtgtgcacatttgtcaatatccttccaattgctgtgatatagctttaaagggtttctaaagttatcctgctcatcctttggcacaatctcttttattgtatcaagcctgttttcctcattgtggatattgtctatccagctatgcagctttaccgttctgtcgtaatagctgtcattttgtaaaaagccattcacttcaaaaaccacaaccttcggatgctgtctggtgagagcttctctgagcattgatttgtacaggctgccgggcactcctgataccccaagcgagtatgatgtgtatccataattcttccaggcctcggttgcgctgtaatcagcgtatacctcgctggctcctatcatcatcacatcaattgtgttcttcggctccttgtaaaacccctctatagtcgcaatattgacagcatccgtcatcttaaaaaatgtcgagacaaacgaaaacagcacgacaaataccagggcaaacgctcctatacggattaccttacgatgtctgccttttccttcgtctgtgctgtttatgggtttattttttataattttctcttttacttttgtaaatctcataaccgtcttcatctccaagcttctttttgccgtaccgtgtattaacagtaacgacattataacctattattgaagctaaaaacggatattccaaaaatcttaatataatattaaaaatctaaagcggttactcatacttaagtcctatcattgtaagcccatgtgccggggctgtaggacctgctgctgccctgtctgttgcggctattatgccattcatcgcatctgccggcatatcgcttccacctatcttcacaagtgttcctgcgattatgcgcaccatattgtataaaaagccgtttcctgtcacacgtattgtgatgatgtcaccgacctttgacaccgtacagtcatatatcgtgcggactgtggtctgtgcctgcgagtttgccgagcagaagcttgcaaaatcatgctctcctatgagatattttgcagcctcactcatcttttctgtgtcaagcggataatgatagaaatatgtgtcaagcctgcgtgtcggatttctgaacctcgcatttaaaatgcggtattcataggttttacggctctttgagaagcgtggatgaaaatcatcgcttacctcacaggaatcgaccaccactatatcctccggcagcttctgattcagtgcatacgatatcttttctgccggcatgcgggtattggtatcaaacatacacacatttccaagtgaatgcactcccgcatcggtgcggcttgctcctgtcacctttatatcctcctttaacaggcggctcaggtgctcgtttaatacctgctcaattgttatgccgtttggctgtatctgccagccgcagtaatttgtgccatcgtaggctacaatcatttttacacgcatatatctctcctgttttgcctgcactatctatttcactatctgaaaataagattgcccagattcaccggcagaaggattctaagcactatcacaaccgctaaaaacgcaaatatgaaaagatatgctattttatcgtccttttcatatacgagcggcttcatctttgtcctgccctctccaccattgtagcatctggcctccatggccattgcgaggtcatctgcacgcctgaatgccgatacgaaaagcggcactaaaagaggcaccatgctctttgctctttttatgatatttccatgctcaaaatcagctcctcttgccatctgtgctttcattattttgtccgtctcctcaataaggattggaataaaacgaagcgctatcgacatcatcatggctatcgcatgcaccggaacatgtattttgtttaaaaagcccagtgatttctcaagaccgtccgtgagctggtttggtgtggtggtgagtgtcatgagcgaggttcctataatgagcagcacaagtcgtatcatcatggttgctgcatttatcagtccggtgtcagaaatgtgcagtataccgtactcccagattgtatactctccctgtgtgaaaaacacgctgaagcatgctgtaaaaagcagcagtattataatggatttgagtccctttaccatgaacttaaagggcacctttgatatctttataactgcggcaagcgcggcaactataaacagcacaccggctattcccttgtaggaaaacagcgcaataatatatattagtgttgcgaaaagctttactcttgggtccagtttatgtattggcgactgagccggataatactggcctatggtaatatcacgaatcatttttgtattccttcctcataatttgtatcaaaatgtcggcattggtgagctatttaaaggcttttagtattgagtccctcgcctccgcaactgtcgtcgccgaaaggtcaaccggtatacccttttccgccagatcatgcatcagatatgtgacctgcggtgctgcaagtccgactgcctcgagctccttgtagtgtgagaatacctccttcggcactccgtcaaacatcacctctcctgaattcatcacaatgatgcggtccacatactccgcaacatcctccatgctgtgtgatacgagtatgattgtgatacccagatcctttttcatctgtaaaagcagtcccagtatctcatctctgcccgcaggatccagtcccgctgtcggctcatcgagtataagtacgtcagggtgcattgcaagtactccagctatggctacacgccttttttgtcctcctgacaaatcaaacggcggctgatagtagagatcctccggaaaatgtacattctgcagtgcctcataggctcttagctccactgttttcctatcgagcccctgatttttcggtccaaagcatacatcctcaaagttggttgtctcaaaaagctgatgctccggatactggaacaccatccccaccttgtgacgcagcttgcttaaatcataatcattgtcatatatatcctgtccattgtagtatatatgaccgcttgtcgccttcaaaaggccgttcatatgctggataagtgtggattttcccgaaccggtgtgaccgattattccgataaactctccatcatttatctcaaggcttacatccttaagtgcctgcaccttgtaggctgagtcggcactgtagcaatagtttatgtgatctagaattattgacatattttctcccgcctatctgtttttcagcgcaacaagcgcacttacaagttcttctctcgtcaggattccatcagggatatcaaggcctgcctttttgagctcatcggctaccagtgtcacctgcggcacatcaagcctgtgttccttcagctcgtccacccttgaaaaaatctcacgcggtgtgccgtccatgaccaccttgcccttttccatgacatagacatggtctgcgccgaccacttcctccatgtaatgggtgatgagaatgatggtcacgccctttttcttattgagctcatgggctgtggctatgacctccttgcggccgtttgggtcaagcatggctgtaggctcgtcaaatactatgcattttggctccattgccacaactcccgcgattgccacacgctgcttctgtcctccggagagcttgttcggtgaatgtgtgcggtactttgtcataccgacagcccttagcgcatagtccacgcgctgccagatttcatctgtcggcacaccgatattctcaggtccaaagcccacatcctcctccacgacattggcgataatctgattgtcgggattctggaaaaccatacctgcacttttcctgacaggtatgacattctcttcctttgacacatccatgccatccacccatatggtgccgtcgctcggcgcaagaagtgcattgatatgctttgcaagagttgattttcctgaaccattatgaccgaggattgcaataaactgtccctcttttatgtcgaggtttacgttgtcgagtgctgtagtgattgactctacattgccttcctcgtctcttcgtataaattcatgtactaatttgcttgttttaattatgcccatttctttttcctaaaaatctaccgtatttacaattaccatagctgttaaagcccaaatagctgccaaaaatatgcgctttgccgcttgatttagtcatcccagctaaggtgatgaagctctccctcaagcctcatatgatcaaaattattctgtctcaatgcctcgtagagcacgatagctactgaatttgacagattaagtgaccttgtctcacctatcatcggtatcctgatgcactcatccggatgctcctttagtatctcctccggaatgcctgcgctttccttgccaaacataatatagcagtctggctcaaaatgagcatcagagtacacatgtctgccttttgttgtcgcataatatatctttgcgcccggatttctctcaaggaaatcctcccagtccacatatgtggtgacgtcgaggtccttccagtaatccattccggctctctttagtgccttctctgaaagtgaaaatccaagcggctctataagatgaagcctcgtgcctgttgcgacgcaggttcttccgatatttcctgtatttgccggaatttccggctcatgtaacactatgttcagctttgccattttgtctcctgtcaatttaaactatttattatccatcccggcgcgaagctctgttacaaactcctcaatgcggccgagcgcctcctttaaatcatcaagcgaatatgcatatgatatacgtaaaaagccctcaccgcactctccgaatgcagttcccggaaccacggcaatcttcttgctgtttagaagctttgtggcaaactcatcggatgtcatgccaaactccttgatgcttgggaacgcataaaaggctccgaaaggctcaaagcacttaagccccatctccttaaagcggtgaagcacatagcgtctgcggccgttgtattcctccctcatctgtgcaacatcctcatcgccgtttttcatagcctcgacagccgcatactggctcgtggtcggcgcacacatgattgcaaactgatgaatctttagcatctgctttaaaatggtctcaggtgcacatgcatatccaagcctccagcctgtcatggcataggcctttgaaaaaccgtttatgagcactgtgcgctccttcattcccggaaacgatgctatagacacatgcttatccacgtatgtaagctccgaataaatctcgtcacttatcacaaacagatcatgctccttaaccacccgaacaattgcttcaaggtctgctttttccatgatagcgcctgtagggttattagggaaaggcatgataagtatctttgtctttggagtgataacagcctcaagctcctcggctgtcagcctgaaatcattttcctccttgagctccacaatcacaggtgtgccacctgccagcacagtacatggcacatatgaaacatagcttggctgcgggataatcacctcatctcccgcatcgagcatggcgcgcagtgcgatatctatagcctcgctgccaccgacagttaccatgatctctttgttgtaatcatatgtcatgccgtatctcctgtcgagatatcttgcaatctcaacctttaactccttgagtccggcatttgaggtgtagaaggtgcgtcccttttcaagggaatatatgccctcatccctgatatgccacggtgtgtcaaaatcaggctcacctactccgagcgaaatcgcatccttcatctcgctcactatatcaaaaaacttacggatgcccgatggctggatagtctttatggtactggataaagggtctctcattatgacataattcccctttcatcggatttgacaggtgccgccatgatagttccatggtccttgtatttcttcagaataaagtttgtctttgtcgaaagcacctgatccagtgtagaaagcttatctgtcacaaactgtgatacctcacgcagagtcttaccttcgagtgtgaccatgaggtcgaagccgcctgagataaggtatacagacttcacctcaggatagttgtatatacgctcggcaatcttgtcgaagcccatgccgcgctgtggtgtcactctgacctctatcatggctgtgaccttctcaaggcctgccttgtcccagtcaatcagtgtgtgatatccgcagatgacattctcctgctccatagcagcaatctcgtttgccacacttgcctcatccacaccaagcatgattgcaagctccttcaggtttatcctgctgtttttctctataaatgttaatatcttttctctcatgatatatattctcctgattcaaatatgttagttgaaaaccttgtatatctcgtcagtctgggcagtctccaaaaatcgtctctcctcgccggaaatcagcactctgtcgtttgaatcggttgtggcaccgactataacagcattttgtcctgttttctcaagctctctgaccacgcgggtaccatctgcagctatgattatcagacttcctcctgacaaaagcttatacgggtttatgtccaaaaattcacttatttcaatcgtatcctgcctgatagggagcttctttaaatcgatgtcaagaccaattcccgaagcctctgctatatcccagagtgctccaaagatgcctccctgcgaagcgtcatggattgccgccacaccggcgccaatcgcggatgcagcctccattgcggtggaaatatggtctatatatgctgctgatttatctataaatgccttggaaaatctcgtttcaagctcggctcttttctcatttgcaagaattgcggtgccctcaagccccacatagcctgtcactattacgtccatgcccggtgctgctgccgatgatggtgtaagcgcctgctcacaggcctcacctattgctgtaactgtcaccacgatattcttcaccgcacggctcacctgtgtatgtccgccaagcaccacaatgcctgcttcctcacatacagtatcaatcgctctcaccgtctcacgaagcacggcttcgttttctgtggtaggtacaagcagtgccagctctatcccaacaggagctgcccccatggcataaatattgttcaatgcatcataaactgcgcagttagcacgcacatgcttatccgatacatcaagtgtgaacgtctgagtagcagtaactaacctggtttggccgcctgcctgcatggaaaccaccgcacagtcctcacctactgccggtttaaaaagtattctgtcgcttttggtatgaagttgttttaagacagagcgctttaaaaccgactctgatattttaccgtttttcatgtgttttcctgttcctaataataatatgctgtgtatactgttgcagcctggtgcattgattgcaaataactacatcagaaacaactacctgcggtcatttactgcgtctgtcctgccggctgctgtgtctgtgtgccctgtgcctgccctgctgcattctggtctgtcggctgcggctgcgtgccctgtgtctgccctgccgcattcggatctgtagtctgggtctgcgcaccctgtgtctgccctgccgcatttgggtcctgtgtctgagtctgtgctgcctgaaccgctgctgccgcagacgcagcaatggatttaaccgagccctcatcattagccgctgccgccgcctgaagctgcgcaacaacctccgctgatgctcctgccgtaccaaccgtcacgatttttggtgatgacttgtacttgctgttgttgaatacctcatcgctctgcactgttccatcaactgtgaccgtcttccatagccttgcggtcactcccttgtgtgcagactgctcggtgttgaaataaccgaccggctgacctgcatcaaaattaaactgcgtgaccggatcctcctcggaaagtgtctcactcctgaaggaaatttccctgtttgcgggtctcgtctccactccgtacacattgaaggtaataattcctccactgcaatagccctctatatacaccggattgtccagattatttttaaacttaagatccttgtaggttcctgcaattgccgcatcgtcagatggctttacatagcttactatcatggaatggttgtagcgctgcactatgtcaagctcagcccttataaccgcattgtagagagtggtcgcaacctgacacacacctccccctaccgagtcaactacctgaccgttctcgtatgcgcctgctatctgatagccgttgtcagttgtgatagggctgatagcctcgtaaaccgagaactgctcccccggatatatgacactgccgtttatcaggctgcatgcgttctttacattggttgcacgccctgctgccgagctgctgaaatcggtagaaaagcctcccagattatccttaatctttgagagctcttcctttgaccccctcggctgaaccgtatttgtgaccagctctatctcattcgccgagccatcccagctattctgcaaaaagtcatttatggcatagactgattttaccacatcgacctctttgccttcctgtcccggaacaaaatcgaagctgtcgccgtttctctgcagcgaattgtcaactgcctttatattgagctcgtcgctcttatcataaatcatctttgcggtcttttgtttatcaaccgacagatacatattgacggcaacattgccctttttgagctcctctgactccacaaatctgtcaatcaggctaccctcatggcacactgaaagagcctcgtccgccgctgcatcagtgtccgccgaaacagacatttcctgtgctgttgcatcaaatgaactatttgcaccctttaatgaaaaggatgtatcctttatgctgtcaacataggcatcaactgctttttttgcttcttcctttgtcataccgcctacatccacactgccaatgcacacaccctctgtaattgtctgtacctttgccttctttgtgcctgacgaaccgcttgcatatgcacttaccatgcctgatgctgccacaagcacaaatgccattgtacccagtaataatgcttttttattaatcttcatttccgcttccttttcctgaggctgttaaaagcgcccctgtcatccgcttaactgaactgcattttatatcatattatcatattttttccatatttcaagaaaagctatacaagacttgacacaaatgttgtcacaagcatcgccgctataaccactattatcactatagcaaccaccttctgatttctttttttattaaaatcgtacatactattcacctctgttcaaaaatgagttatactattttcatatatgagaaaggattttccaacatatgattccaatttgtctaattttattcattttatttattgcagtgattacttttgccataaagagagctgattctgcccaggcaaaggtcaccgaggagttctgggagaaggagcgtaaggccaactcaaccctccgcggagataccactgacctgtgttatattaccataccggaaaagttttttccattaaataatgataaaataaatgatttaagggataaaacccttgtcaatctcaccggaatgacaaacactgatttaaagcttaaatatggcattctcaattttaaaaagctgtctgaatatgatgataatttcactaaatttgtttcaatgctgccggactattacaataggcttaaggatgcaggctatgaatcgctaggcaatgaactgcttgagcttgcagtagagcagggtgctgattcaaggaacgtatacagcctgttagccaacgccttcatcagcatgtcaaaaaccgaccggcttgcggagcttatcgagaaagcaaagcagctcaattctctttcaagggatggaatcgtttctatgcttgagagcctacaggctgatgtcgcctcggccggtaattaaattacgttatagcttattgtattataacttattgtattgaaagttattccgagccatccacacacctattaatgtacttactgcgatattcatcgtacagccttgaggcctgacttctggtcaggttgtcccacgatatgacatctgctatcccatactcagccatcagctcctttagctgtctgacctgatgtgccgtggcaggtgtctgtttttttgccttgtatacaagtggctttgactccaccggctcacccttttcatccatcaatgcaagcagcttttcaaatatctgctttgtctctatcgcatcatcgagcgccctgtgagcattttccctgctcacaccaaaatactcacacaaatcctccagcttctttgactgctcagcaggcagacattttctggctattttcagcgtatcatatgcattcagcgagagagttcgcttgtgatttaccgcccactgctttaaaaagctgtaatcaaaggtcacattctgcccgagtatgatatcatctccgataaaattaagcaggttatccacagccgcgtccatatctgccgcgttttccacatcattgtcggtaattcccgttaattcctgcacacgttgtggaatatgctgcttcggatttaccagtgtggatatcgtatccactatctcgccgcccctcacacgtgccgcacctatctctattatcttgtcatttttagctgaaagacctgtcatttccaagtcaatcaccgtgtaattttttatattgtctatgttgctcatttttttagtccgtaaaccttcccggcttttaacactatagtcatttcacgttactgctattttatatactccgctatagccatatcgctttactgctattttatatactccgctatagccatatcgcgttactgttattttatatactccaccagcgcctggtgatcaagcgggtctctcatgtcgtagtggaaaagcgcccacaccggctccttatgatactttggcagttcatccagcttgcgcgtgtgcttgtcaggaaaaatatagtgaaacggctccacatgcgacagctttccattcttacagtatgcatgtgtcatgtgcttgaagcttcctatatctgtggcccacaccgggcggctcttgcagttctcacgatagtacaaatcaaagataagcgattcctgaatcatgctgtaaatctgcgcattttcatcaaaatcggtattatctctatctatggcattttcgtcaaaatcagtatcatctctgtctccgtgattttcggataatcccacagaagtcatatcgtcgttgtcacagccatgcaggtataaagccagaaactcaagcagtatctcgcaccttctgatgcgcgaatggctcattccaaaatagccgtttgcctcataaaaatctccaagcttctgaaaaaactcaaacgcactgtcaaagatacactccatgagcttcatcgtaatctcaaactgtccgctgttgtaatacacctcaagcatatcctcgacgcgcttaatctttatcacatcatcaaacgaaagccacttcgtggacattacctcatacggtggcttatcatggtagacaataccatattccgcggcatgctcaaacatatacgagcccttgagcacctttaaaaatcccagctgcagctggtttggcttaagctcataaatctcatcaaaggaacgcccaaagctgtcatagtcctcatatggcagccctgcaatcagatccagatgctcatggatattgttgccgctttgaatgagcttcacaacctccttaagcctctcaagcttcatagtcctgtgaatctccttaatcgtgacctcattggtggactgcacaccgatttcgagctgtatcagccccggcctcatatcagaaatcagctcaagctcctcctgattcagcagatccgccgatatctcaaagtgaaagtttgtcacaccattgtcattcgcctttataaagcgccacagctccatggcatgagcatgattgcagttgaaggttctgtccacaaacttaatctgcggcaccttctggtctataaaaaacttaagctcccttttgacaatccgagtatccctgaaacgcagtgtcttatccaccgatgacagacagtagctgcacgaaaacgggcatcccctgctgctctcgtagtagatgatgcggtttgaaaaatcatcgagagtatcatagcagaacggaatttcactcatgtttttgattgggcggggacttgtgaatactatttcatccgctttgcagcctcctatgttgttcacacttgtactattacctgtgctgttttttctgaaagcaatgcctgcaatatcactcagctttcttttatgcgcatagtaaccgcacagctctctaaaggtatcctcaccctcgcctatcatcacaccgtctatgtatggattttcctgcagaaatgcctccacctcgtaagacacctcagggcctccaacccatatcggcactgacggacaaagctttttatactcgcgtgcaatatcagtcacataatcaatattccatatatagcacgaaaaacaaagtacgtcgggctttctcttataaagctcctcaagaatgtaatccttttgattgtttatcgtgtattctgcaagctccacagcatccctgtactccccggcacaggcgcgcagtgagtaaactgcgaggtttgaatgtatgtattttgcatttattgctgtcaataaaatgttcatggtttctccttaaaaaatgacccttgaatgtagactttatgcgacattcaaaggtctgcttcgtattattgcagcatccgttcaattttatttttttaacggctgcattggtacaaattcaattttcaactgcatccccattccatgcgcaagcctctttaaaagtttcaaagatggatttctcgttccattctcaagcttactaatatccgcctgatcaatgcctgtacgtgctgcaagctccttttgagtcaaattatttttaatgcgcgcatctatcatagcccttatgacatccatctcaggctggagatcgtcccactctttttttacgtcaggatttttaagctgctcctgtaaataatcgtcatatctcatattatttaccatgcctttctatataatctcttctatatttcttagccttttcaatttcaccagctggtgtcctctgagtttttttaatgaatccatgtgtcaatactattcttccttcataatagaaaaaatataatactctcgaaatatctgttcctaccttagctctcaattcaaaaatcccatcaccgagcggcttgctgtatggttctctcagcaacgtacctttttcttccaatagtttaatttccatcaatagcttagctcgcatcttaacatttaaactatctaaaaaatcttttaccggaattttgtccccattctcataaaattcagcaataaatccacccataactcttccccactatcttcacaaaatattatatggtatttttaccatattgtcaaatcagttactttaatttacatagtcatattaacaagtctgtcataaatgccgcttgcaaacagcaccatcatgccaatcgtgcagatgaccgacagtacaaagcctattatcgatgtaatcataccggcagttgctattgtattgttatactgctttgccttttttgacattttggaagcaagcatgccgacaattccaagtcccatcagatatccaaaaaacgagaaaataatactgcaaataccaagcaccagtgaaacaactgcaagcttagcgccctccctctcgtcatctatgatagtctcattattgtagagcatctcaagacggatacgccttgatttacgcaacataacaagcataggaataccgagcacgataaacgcgatacagttcattgccgaaaacccattaatcctgtcggccactcctcctccctcaaatattcccgatgataaaagtcctcccatatctacaacagtatgaaaaatggcaagcatccagaaattgcgtgtagacgcgtatatcatgcaaaacagcacacccatgagacctgctgaaataacctgtatcagacaactgctgaacttaacccctgcgcccatattggaaaaatgcatcaatccaaacagtacgcctcccaaaactacggctcctgtgattccacctttcgtctttggaaaagctctcagcagcagattaaacaccacgcctctgaacaccagctcctcaacgagccctacaaggcagaccgcaataaagaaaaagatgatgttgtaaaatgccttcacatcaccatgctcacccaaaaagcacaaataaatgcctgaaacaacagcatacaaacagtacactatgaaaaaaccgcctgtgtataagcttcttgtccatcctgctgcattttccttaaagatatcccacagcccaaataaatatgtgatgcccagaaaaataactaaaacaacggtctccacaatagcttgcagcagatagtcatccgccttttccatgccgggaatcaggcccaaaacttttccgctccactgcaagggtgcaatgaaaagaaagactgcaagaatggcaaatattatatttgccggtgccgaaaggtttctcaatttctgtttcataactttaaatctcctcatttgtgtgttattaagtatgaaaatattctatagcatttactttgacattgcaagttccggataatcaaaattcctgtctattgttttacttgaattgagcactccgtcaatatctaaaaaaatcagccatttacggtctttccgtaatggttaatgacacaccgatttctgccacagacgagaaaattgaggatataaaatggactttcagaagggcaagaaaaccaaagaaaaatatgaaagaaaaaaagaaagagagggctcatcgtcccaatgtcattaagttaagatgaccaatcaagatcttagcatcagaaatgatgctagggtctttttattttgtaataaatgcttgacatatgattcgaaatgtgcggccgctttcgctattgaatgataatgaggtagcgaaagcggcccttgtaattaagaacatcttgattgcaaggaggtaacgcatatgagcaattatattaatcaagtttcagattctctaaagaaccatatttcggaattagctaacaatccatgtttatttcttcgaaaccccaatgtcgatttctctcgaaaacggaaaattgatttcaaaacttttataggaatcatgatgaattcgggtggagctactatgagtaaagaactacttgatttctttgattttaacaaaaatactccgtctgtgtcagcatttacgcaacaacgttcaaaagtacttccagaggcttttgaatatttgtttaaatcttttacggatgacaaccttccaactactaataattatcatggttatcgtttaattgcatgtgatggaagtaacttgaccattgcaaccaatcaaaaggatccagaaaccttttgggaacgtaatcagtatggttcaattgttaataaactacatctaaatgccttttatgatgttttgaatcgtatatacaccgatgttttagtgcaaacagcagcggattacaacgagtctagagcatgtgcaacaatgattgacagatcgaaactagagaatgttattcttgttgctgatagaggatatgaaaactataacatttttgcacatgcaattgaaaaaggatggaaattcgctatacgtgtcaaagataaaaatagtaatggaattgcatctgggttaaatcttcctccaaatgatgagtttgatatagatatcactcagattttttcgaggaaaaatacaaagaccacaaaaaatgcaggctataagtggatgcctgcaaatcaagtgtttgattatcttccacgaaaaagtgataaaacatacgaattatcatttcgtattattagatttcctatagggtctaattcttatgaaataataattacaaatcttgatagaaatatttttgatttaaaaaaaataaaggaaatctatcatttgagatggggaatagaaacttcattcagagaattaaaatatgccataggattaacaagtttccatgcacgaaaaccagattttattaaacaagaaatatatgcgcgattacttttgtataactattgtgaattaataacaacacatgtaataaaacaaatgaaaaacaatgataaaacaaaacaggtgaactttacaatcgccatttatatttgtagagaatatctccgtaataaacgcaatcttagtccacctgatgtgattaacctaatagaaaagcatgtattaccaataagacctggtcgaaaagaccctcgcaaagtcaaaccccaggcatctgtaagctttctatatagagtggcttaatcatagataattataagttttttttgacagatatacaatctgtctttttgttgtgctgcaaaatagataaaagaaaaaaacacatcatatttatcaaacaattgcaaatatgatgtgttttataattatgtcaaaattcttaacttaatgacattgctcatcgtccctctctttctcgcctatcagtatgtcatctaccgatgtgtgcaacaacctgctcaaggcatacagattgtcgaccgtcggaaggctctcaccgttctcccatttcgacaccgcctgtcttgtcacattacatgcctcagcaatgtcatcctgtgtaagctgattcttttttctgtaaaacttaatattgtcacctatcaaaataaatacctccaattcaatttatacccaaaattataccgacaggtggctgaaagtaaagaaaacattggttgcaaatgcgcaactttgggagggttgctattcaatcttgctttttatgtctataaagcatatatcttttctgtcccaagatgctcaaatggtctaaacagttctcttaaggaatctgacttcgaccaatcaatcttagaaacaaatgttccaaatgagcgcattgcatttttaggatttacctgattgagaagaaatttccatttccattcccatacacgccttctgctttgattccgtctgtgtcttttctttcacctcttccgcagcgtacactccctgttgtgttttctttgaaaaaaagacggacatacatgcccgccttctccatggttattttctcgtttcattttttaactatcgtttctatgaattcaaattttctctgcgtttctttacagtaataatcaatcccgttccggaaagaattaatagtataaacagccatacactcggtgtgttgtccccggttttaggtgcagtcacatccttcttatcagttccactcgatggcttgtcatcagaggaatcgctattgttattgtcattctggttgttattactgttatcagaggtatttgctttgatggtaaatgtggtgcttgcagaaccatccgtccaaaggatttcaactgtattggttcctgccgaaagtgtattcaggtaggaagctttcagtgtgataatggtagagccttcctttgcagtgtagttgctcctgtctatcaaatttccgtccaccttaactccggtaaacttggagaagtctccgttaccccggatggtgatattaccatcactgtcatgcgtccaactactgtttgctccatcaataatctgataggtgttattcggtgtgtcaggattatcggaaccgcccgcatcctgtacggtcaatgttgcggaattactctctacgtttcctgcgctgtttgaaacaacacacttatacttaaatccgttgcagcttatattgactgtggatgtggtatagctcgttgccgttgcaccgtcaatgtttacccatcctttcccatcatttctgtctatctgccactgataggtaagatctgtaccgcttgctgctatggtaaaggacgcagcctcacctaccttcactgtcgcattgccaggctgtgtggttatgcttggtgcaatcacatccggcacatccggtgtctggctttcctgtttaaaggtaacttctatggtgtgatcagtattcacatcactaaaggtgtagcttgtggttgctgtcacttccgaaccatccacctttacgtccgcaatataatatccttcgttcgccttgattatatatgtaagctgacctgcggcagataccgttgtcgtgccaccgggagagattgttccaccgatacctgccattgcggtaatcttgtagcttgctgtaccgctcggaggcgttatgcccgcatcctgtacggtcaatgttgcggaattactctctacgtttcctgcgctgtttgaaacaacacacttatacttaaatccgttgcagcttatattgactgtggatgtggtatagctcgttgccgttgcaccgtcaatgtttacccatcctttcccatcatttctgtctatctgccactgataggtaagatctgtaccgcttgctgctatggtaaaggacgcagcctcacctaccttcactgtcgcatttccaggctgtgtggttatgcttggcgcaatcacatccggcacatccggtgtctggctttcctgtttaaaggtaacttctatggtgtgatcagtattcacatcactaaaggtgtagcttgtggttgctgtcacttccgaaccatccacctttacgtccgcaatataatatccttcgttcgccttgattgtatatgtaagctgacctgcggcagataccgttgtcgtgccaccgggagagattgttccaccgatacctgccgttgcggtaatcttgtagcttgctgtaccgctcggaggcgttatcggcgctgtatcctccgtaaaactccaacttccacggaataccacggttgtgccgtttaggttgccggcatcccagcccgaaaaagcccatgtgccgtttttaccatccttttgtgcctgaatgcgtgttgtggaggtatatttcttatccacagccgccttcgcctgttgcacactcgaataggagctgctatttagcggcagcgttgcgcctgtcgggaatacagagccccaattgtattgcaccgtataattttttgtcaccggcggctcggggcgttcctcagaccttttataaatataacgaatcgtcataccactgttcgggacagcattttccatcccctccgctttaacaaaagtgtagccgtgcagttcctgcggcggctgccaatcaacctttttgcctaccggaacagtaaaggtagtcggcatggtgtttggaacatctgtgccatcctccagctgatattggatggtgacattgacatagcgctgctgctccgtatcatcatcagccaatacctcgcctgtcgcatgatctacaatctcaaagccgatggtatcgccggattgcagaatggcattctccggaatcgtgtaaaccagagagcagttgacaaggccggaattaaagtcgctgccctcgtaatccaacgcaccctttgtccagaatttgcttttctctttccaaacagggatgtcaaactcctgcgtagtgaaaacctgctccccatctgtcgtgaccgctttttcgccgttggaatgttccacccacaggcgcagggtcacagtcttcgcttgggtattcgaaagattttgtataatggtgcgcagctcaacctgctgccccttcatgctgctataatcaaagctgtttttactgccgccgcttaatagacggctattcctgtcattttgatagctcgcatatgcggaggaattcgctgcctcaaaggcagaaggatcttttgtgggatttctgtaaccgccgatatactttttcacctcaggaacagccacataaagcgcagggggatttgtaatgagctgactcatgacctttatgccctgtagcttgcacacatcgcaaaaatcattctgaaaggtctctcgcatcagacaatccctgctggaattataggtataaggatagtagtcaagatgtgggcaggtataggtattacggaagccaagcagctgcttccacttcactttcgtgggatcttttgttgcagtcatattcagtgatgtagtgtaattccactcatctacaggaacagtgctataattatattcatctcccagatggaacagaccgtgtcccagttcatgccgctgggtaaacgcagaatatgcgtttctcgctgacgcaacaatatagtgaataccatattgtttattatcatgagagccaccgaaatactcaccgctattcgccaacacaacgaattggttgatattttcatacacataatcatactgtctataattatgatccatcgtgttttcgtttggatgcgtttcattaggaatatgtgcgtcatgaatcttctcgataaacgcagggcctatgatgcgctccaaaacatggttgcgccagttccctttgttagtagaaattcctcctttggcggtcgcagcaaaaaatgtgctggtaccgccatagccatccaccgatgccgtgcagagtgcatagacattaaagcgatccgccatgctgcgatatggctctatctgcaatacctccccccacagcttttttacatcctcgacaaactgcttttgctggcttttggtgtagccctcggcgcagtacacaatcaccatgttctccttatcgctgcgaggcttctggattgtatacaccggtacggttacatttgcatatgcaggatcctcagtgtagagggtactcatctccagctgtagatactcatccgtgttcacattccagtcaccattcacatcctctcgcacagcgccggatatgccaatgctgtcatccggcgcatccggtgcggaaacaacataggggtcctgtgcgctctgtcctgtgccggatgatacggtgtaattttccgtattcagatagaaggcaggacgaacgccgtaatatcccttatagggtgcgtcacgcaaaatattcccttgaggggtcacaaatcgcatatcatggttacaggttgtaatcggtgtacgcagccaatagttccatgctacaccgcttctgttttttgcgatatggtagccgttcaggttatcattaaccgttttgagctgctgaacatccagcagaaaaactctatcccaaatatattcataatgggcactgtcatacccatccgctaccgtatcaattgtggtgttatagggaagatcaacaccggctgcgtcgatataacctgccgtatactccggatgggaaacgatagaacgctgcttcaccgttcgaatcgctcccagctcatccgaacgaaagctgcgaaggaagccctccttttggtcatatgctgccgttttaggatagacagaatcctctgttggcggatttccgcaaagccatttcacttttcctgcttcagcgttggaattgagccaagaacgtatgttgctgtctctccagtggttagaaccaaaattatctctccagctattgcgccggtgcgagcctgtttcggcatttttgttggtttttgcatcatagggcatgtaatcacacaatactctatccgaaagcatcaatggcccattgctatccttcgctacacaacgccacacaattggctctcccccataagtacccatctgaatgtagtcaccaatttcgatggttggcttgttatctgccgccctaacctgcaaagggcatagcaccaaaattaccgcaagcagcagagataccgttcgtttgccatatttatgtttgataatattcataaagtcctccttttgtcattctctcctgagcgtcattcacggtcagtaggcttctaccccccatttttgacatatgtcaatttatacaattgctgcatcatcgatattcacttcatttctacttgagttattgcaaaaaataggtctttctgcgataaccccttgtgccaaatgctgaaacaccttcataaagatgtaatagcttatttattttagaaaagtatccgacaaaaaactctacacttccgacaaaaaatatatatatttctcaaaatatatcatggcgatgtacatttgtcaatgatgtgacacctcaagatcaccacaccaaaaatgaaattttaaattccaccaccaccatttggtggtggaatttactcccgcacagtaaaggtttactctttcatataaaaatggtaaggttatctttctttctgacagcagtagaaagaaggatatccatgagtaaatatattccaggaaaccagaagcacctttcccttgaagaccgtatctatatcgaaaacgaactgaacaagggagaaacctttaagaacattgcccgctttctttgcaaggatccaacaaccatttccaaagaagtaagggctcaccgtctatccgactggtatcacaaaggtactttctataatgcccataacttttgtattcatcgcttccattgccggaaaaccaatgtctgcggaaaaatcattctctgcgatgtaaaatgcacttcctgccccacctgtaatcaaacttgcaaggattttgtgaaggaacagtgcaaaagactggataaggcgccctatgtctgtaatggctgcacaaaaaagataaatcattgcaccatcgcccagaaatacagatacgatgcacgttttgctgatagaaaataccgtgaaaagctttccggttccagagccggtataaacatgacaaaacatgaattacgcaaaaaggatggcattgtttctcctttaatcgagcagggacaatctccatatcaaatcattaccaatcatccagaactggatatgtcagtccgttccttgtacacctatctggatcaaggtctgtttacagccagaaacattgatttaaaacgtaagcccggcttcaagccacgaaagtgccataaaacacagattacaaacagaaccgtcttcgagaaaaggttattcagtgattttagtgagctgcagttatcctcttttgtagaaatggatacggtacactcatccagagaatccaacaagacgttactgacctttttcttcactaaggaaaagctgttccttgcctttctcctgaatcgttgtactaaaggcgctgtccggcttatttttgaccgtttagaaaaacgtatgggcacctatgagttcttatctgtctttgaatatatcttgacagacagaggttcagaattcggagatcctgtcgctcttgaaacaggactggatgaaattcagcgtaccagcatctactattgtgatcccatgcgtagcggacaaaaaggaggtcttgagcaggctcacaccatgcttcgcatggtgcttcccaaaggaactagttttgaatttttgacacaatgggatgtgaatctaatcgtgaatcacatcaactccactccaagggaaagtcttaatggaagcacgccttatgacgccgcattagagacactcggaaaagaaaccctaaacgcatttcagcttaagcgcattgaccctgatttggtcaatctaacgcctaagctgattcgcttcaaccattaacaaccacttagaaatctgctgtcggactggaaattaaactttcacattttcctcacatgaccggtggaatttagtctcgcacactaccttccagtggtccgtttgtcataccatcaaatcagttttttccaagaagttactcctattataacagaaataagcgttttgagcttataaaactcttagaaaatcaagaacttttaaatgagtgtggaatttacttctgcactggaatttactttttcaagttagccaagatcaccacaccaaaaatgaaattttaaattccaccaccaccatttggtggtggaatttactcccgcacagtaaaggtttactctttcatataaaaatggtaaggttatctttctttctgacagcagtagaaagaaggatatccatgagtaaatatattccaggaaaccagaagcacctttcccttgaagaccgtatctatatcgaaaacgaactgaacaagggagaaacctttaagaacattgcccgctttctttgcaaggatccaacaaccatttccaaagaagtaagggctcaccgtctatccgactggtatcacaaaggtactttctataatgcccataacttttgtattcatcgcttccattgccggaaaaccaatgtctgcggaaaaatcattctctgcgatgtaaaatgcacttcctgccccacctgtaatcaaacttgcaaggattttgtgaaggaacagtgcaaaagactggataaggcgccctatgtctgtaatggctgcacaaaaaagataaatcattgcaccatcgcccagaaatacagatacgatgcacgttttgctgatagaaaataccgtgaaaagctttccggttccagagccggtataaacatgacaaaacatgaattacgcaaaaaggatggcattgtttctcctttaatcgagcagggacaatctccatatcaaatcattaccaatcatccagaactggatatgtcagtccgttccttgtacacctatctggatcaaggtctgtttacagccagaaacattgatttaaaacgtaagcccggcttcaagccacgaaagtgccataaaacacagattacaaacagaaccgtcttcgagaaaaggttattcagtgattttagtgagctgcagttatcctcttttgtagaaatggatacggtacactcatccagagaatccaacaagacgttactgacctttttcttcactaaggaaaagctgttccttgcctttctcctgaatcgttgtactaaaggcgctgtccggcttatttttgaccgtttagaaaaacgtatgggcacctatgagttcttatctgtctttgaatatatcttgacagacagaggttcagaattcggagatcctgtcgctcttgaaacaggactggatgaaattcagcgtaccagcatctactattgtgatcccatgcgtagcggacaaaaaggaggtcttgagcaggctcacaccatgcttcgcatggtgcttcccaaaggaactagttttgaatttttgacacaatgggatgtgaatctaatcgtgaatcacatcaactccactccaagggaaagtcttaatggaagcacgccttatgacgccgcattagagacactcggaaaagaaaccctaaacgcatttcagcttaagcgcattgaccctgatttggtcaatctaacgcctaagctgattcgcttcaaccattaacaaccacttagaaatctgctgtcggactggaaattaaactttcacattttcctcacatgaccggtggaatttagtctcgcacactaccttccagtggtccgtttgtcataccatcaaatcagttttttccaagaagttactcctattataacagaaataagcgttttgagcttataaaactcttagaaaatcaagaacttttaaatgagtgtggaatttacttctgcactggaatttactttttcaagttagccaagatcaccacagtcctgatacttcttatacatgtcattgatataaatcgtaggcgaaatattcctgccttcctctcgtaagatgatgccatcaagagtcacatttaccttttccactggctctgccacaagctccattcctttgaatttctcaggcatataatccataaacttttcttttactacttccttaaaaatctcgtaattcatcatattacggttcctccttaatctaaattgtcatataaaatcccttcatcatcaggatttttgtgttctctgtaactgttgtcttcttcgattcccatatcaaaagtggtatgagattttcttttctttctgtaataattcttgagaaacatacactttctacagtcctcacagaataattcttccggcggaatgcctagtgcctttgcaatcctgttcaacgttcccgtccttggaactcttgaaccattttcgtattgggcaattcttacatcacctctattttcaaaaccacttttctcgcccagttccctgagtgtcattttttgtcgttttctgtaatacctgattctttctcctaccactgtttgtcctccaaatcaaaaaaaagcggggaacataagtcactggcttacattccctgcaaggtttattgttactgtttattctttttctttcttccacgaagtcctactccaacacctgtaataagtgcaagtgcaccaattccaagataaagaagcggatttgcattgtcgcctgtctgtggaagcttaggctctgtcggtacattgataagcttaagagttgttacaacaacatccggtgcattgtcatcgtatcgaagagttacatcgtgagctgtctcatcgaggatatatccgtcagctgcttttgtctcaactactgtataatggatatcttccttgaatgatccatcctcgttgtaagtacagataggaagctccttgctctctgcatgaccattcttgtcagtagtgagtgtgtcaagcacctttccgtccttgcctgttactgttctctcaatctgtgtatcagcttttacgattaccttgccatctttgttcacgatatcttctttcgcaaataagccgaatactgctccttcaagtgcttccttagtctctgaatcagtcttggttacagtaatctgcactttctgacgctcatttgtcacatccattcctgcaaatacaacctttgtgttctggtcgatataagaaaggtctgcctcaatcggtgtatcatctaatacaaatccatcaattgtctttgtctcaacaagataatacttgccaagtggaaggtcatcaattcttgcgatacccttatcatttgtcacgatggttgccaccttgtctcctgccttatgatatacagtatcaagtccgtcggcacttacgatatcctcttttgcatatacatcaaaagttactcctgcaaggctgtccttgaaaaaattgaagataaagtcgtaccagtaacccttcataagagtagtatctgttacaaattcgccgtccttattgatgacaatggaacctgtaggaacttcatccttcatctctacatgctgcactttgcctgtatcctctactgtaaactggatatctgttgcattaagatatccgtaaggagcaaattcctcacgaagtgtgtaaatctcaccaactacaagtctcttgatcacatgtgcttccttagcatcagatgtccatgtgtctaccacatttccatccttatcaagtacagtaagtgttgcacctgtaagctctgcaccgcttgtgatatctgtctttgtaaactcaaaggttgttggagtgtttttatactcgctgttatatacagcagccttaacatcctgtccctgatattttgtatcaaagtttactgcttcctcatttgtcacatatccggcaggctttacaagctcccttgcaacatattttgcaaatggataatccttaacaaaagcaatctttccattctcatcagatgttgccttctcaagaagtgtgcctttctcgataattaccttgccagcaacattcttgatatcctcgtctgcataaagaccaaatactgcacctgcaatcggtgtgttatcttctgcatcaagcttagtcacagacatatcaagcttctgtctgtcatctgagaaagtaaggctctccttgataacaggtgtcttatcatccacatatgtgaatgtcactttctgctcattcggatttaatacatatccgtatggagcttccacttccacaactctgtactgtccaagaggaagattcttagctgtttcctttccatccttaccagttgtaagagttgtcacaaggtccccctcgctgtaatacttaatgcggtttccgtctgcatccttctggttgtctgctgtgtaaatatcctcggcagcataaactttgaattttgctccggcaagtgaaccttccctataaacaaactctttctcatatgagcttgcaagaagtcctcccttgaatccgtcaagtacctctcccttcttttctacagtcagctctccgactgcaggggcatcggaatattccacagtaatgattgcatcatttgtatcaccatctgtttcaaatgctgtgtcagtatcaacagagatgttgacatacttatcatttacaacatatccaaatggtgcagacacttcctcaatacggtagttaccgattttcagtgcctccggtaagattaaatctccgtcctcatcagtaaagaatgaagtatgctctacctttgacggatagtctttaagctatacccaaactcacggattgagttatataccttatcaacaaaatcctctatctctgccttaataatggcaaagtattcatcatcaatatctgacctgccatatcgcatgatgttctgtatctctgactcgtctacctctccgttaagctgtcttacacactgctcattgatagaacgcatacaggtaataagacctttgggaatcgtcacacactttgattcatccggagacttgttgattaccggcataatgtcgattgtccagcttccaatatctactatcagtgttttctttgccatagcaggaatcttgtccactactgctgcatagcactgaggaaatactgccacatcatcaatttcaatatgatatgactcattctcatatttgaagcttacacgcttattctttgtcaggtacttgataaaatcattcttctctgctccaaaccttgtaagcggaagtcctacagcaaggaatacctttgcctctgcaagacctcttcttttaagttccttagcaactgctgcaagagtgagaagataaaagctgtcatcttcgaccttggtatcctttacttcctgcctcacagttccaaccttatagaactttccttcatactcaagtacatcgccgaaaagtgccggagttgttgtaatctccttaacacctgtgacaaatacctgagagattgttttcatcattgaccagccatgatcaatgccgattacttctaacttgttattcatgttcctttcactccttttctgtattgtctgcattattgttttgcaaaatttcatataattacccacaccctttcaagtgcttagtttggtcagatgcaggaatatcatcagacctgccataaaaatgctttctcattaattcctcatacagttcatcactctctgccttaactttcataagacagtagagaaccactgtactaataatgattacgaaccaaattaacactttgcccattcgaccactcctctcaaataaaaagaggaccaaaccagctgatggaatattccatctcaagtgctaatttagtcctcactaaatgttttgatataaaattgtacctaatctaagcacacagattcactctcagactgattgcggacatctgtgatactgacttggattttcggttttgatataacagcgctgccttatctaccgctaaattggtataaaaataaggactaaattaggcataaccccttgattttacttggtttcatctaacttggtcctattataactcaaacaccacgctgccacttgtaaacggcctgcgttgattcgaagcccatatactccgcaacatcaatcacccttaggttattgtccttgcggagctgattgattcgttctccggtagccttaagatctaatactggataattcatatgaatgcctccttgtgtaaattcgttcagtacgttacttactaattacaacatcctctgcatacgcatcagacaccgctgtttttctatggatgtaaggctattattatcgattgctacgttttgtgtggtgttataatacatcaatttattttatttgtaaagattttttattttctttaagaatatcttcaaccgcctctatttcagaaagaattaactgaacttcatattccaaataaatatctgttgagtatctgtttaacatgctttccttacaatatccgtctctcttatatgcttatatagacagttttcttcctcgacacatatatcatacgatggctcgtcctcctgctctatggttcaatatacgtccactatttgaatcatgccacacttttcgttgtcaccgatttaaaaactaccatatcgtttcgttgcgtttaaattttggcattccgataatcctgaaacacctccattatcagtctccctctatcaatctgaatgtcttatagtttgtatcgtcctgtgggctgcagtatatcgcaaactcgatatttttaaatgcatgcatataatctttaatcacattttttgcagcatatgcaacgatatttgctttattcataaaagctccacatccaaatgctccaagtattactgtatcgtttccttcagaaacggcaacatccagtatacgtcttaatctcttctcatgtatttcaagcatttccttatcgctgatttttgctgcctttttgccatcgcctgtattatgtttattgcttggcatggctcttaaattcggtgctgcgcaagtgattacatttaccttataccactcattctcgggcaataaagccgggttatttgtatcgcttttaaatacagttacctccggtgtataaatgatatcgtcgttatgtaatggatttcttgcctgcttatgaggtgtataaaatccatcccacatatcaggtgaattcagacagaaataaagatatgaacacctgcacaggcactcttcctgggctgttgaacctcttacaacacctccgcccggatttgaagcagatgcaaaattgtgtactgctaccttattatctctatatgcctttgcagcctcaaacgttctcttctttgaaacaatcacttttgcaggctcatcatatatatttagattcggtttctccaaagcatctgtttccaatattagtttctgtccacttgcagatgcctttaagtcagcattaagctttccattcgttttgcttaatctctctgtatcctgaaatattaatacattttcttctcttcccataatgattctccatttctttaaaaaatgcctgtgttaccagcattttctatgccatagctgtctctctttccattataccttacaattccgtctactgttaattttattttcttcatcctgttttttcaataaacctgtggtttacttttttcatgtcagttcttgctgacataatgataatacaccaacttcgagaaactattttcatgagaagtttacaccttatttcaagcaaagtatttcatacttcgatggacagcaaaaaagccctgtccttacgaacagagccctatgcattattttgcacttacaagccttactatcacatcaattccagccgcccaaaagagtatcgcccccacgatatatacctttgtcttctgctcaaaaccgaaatgatatcctgtgtaaatgcctgccactatacagatgacagtgagcagcgccaccattatcataatggtgaaaagtccggtaccgaggaagccaaatgctattcctgcaagaaccgtataaaatgcggtgattcctgctatccttagcaccctcttcatgtcaagctgcgcctgacagtgctcctcaatcctttcgtttcttatagcctttcctataagcctgatccccagtcctatcagtattccgatagaaattatctctcctaaaagtgcttcatccttcaccgagtatttcccgttaaggaagcttgacaggaaatacccgatgtacattgctaacaactggcaaactgcaactatgaagcaaatggctgtaagctgtttcttatttactttctggatcagggaaccctgacattccatcgcaacgaaaatctcaagtgagcttcccgccacgattaacagatattctatccagcccatttttgcctcccctaatgtttaaacatcctttaattaattatttgtcgctatctgccttagcatctattgaagctaatttatatatgaacttaacactgcctatctgtccatcagcaattgctgagtatgtctgatattcctcacctgcgtcaattactgcctgaagcttgttggtgaatggctttaagtcaccgttgtatgcgtcgagaatcttgttgattccctcctcattgaactgtaccataccgtctgcaagtgtgtgtgcaccctctgaaagtgtcttagagcctgttgtgagctggtcaacacctgaaactatctgatttgttccatctgcaagctgtgatgctccgctgttaagctgtgcgttgtttgctacaagtgtgtttgatccgtctacaagctgcttgataccacttgtgagagttggcactgagttcataagtgactgtgttccggctgaaagctggcttgctccggcattgagcgctgttgctccggcattaagtgtatcgttgtttgctgtaagctttgctgctccggcgctaagctgagacgaaccatcttttaagtttgcaacacctttagcaagctctggtaatttttctgccaagaccttagctccggcattaagctttgttgcaccactcaccagactctctccactctcctgttttgcattaatctggtctgaaatatttttctttgtagaatcaattccggtaattacagcctcctgtgctccggtttcagctcccgtttttgctgcgtctgcaacagatgttccaactgcatcctttgagctgcttgctactccatctaatacctgtgtagccatagtttttaactgactgtcagtattgcttgtagataatgctttaacatcgttatcgtaatctttgccggaagcattatatattgcttttattgctgattctcttgaacccaacttgtcttgataccctttaacagcggtctcacctgccttttctacaacagcaacctcaatctgttgtttaacctgtgcttcaactgttgaatatatcatattatataaagttttattagccttaaggctctcaacagttttttcaacactgctatcgcttgtcatttctttataatactcatcagcagcatatttctttgtattattataacttgtagcattagtatcatctgccagttttgcatctactcctgcttttgcagcttccttatactttgcagcttcttcatctgacatcgggttctttaaagctttatctaaagtattaattccatctgacaaagaatttacaccagacacaagagatggagcactctgtgacaacgtgtctgtgccactcttaagtgtatccatagctgcatctaaattgcttgctcctgctgcaagtgtgcttgctccatccgtatatgacttcaaaccatccttaagtgttgcacttccacttgcaagctggcctgctccactattaagcttatctgctcctgaaacaagggctcctgtactgtttccaagtgtattcagcccaccacttaatgtactaacaccatcagtatatgtcttaagtccactctgcagtgtgccaactcctgatgcgaatgtgccgagcttgctctgcaatgttgaaagtccgtcagcaagtgtgtcggtaccctctgccagtgtctttgaaccatcctgaagctgtgttgaagcatcctttaagtcatttatcatgtcatcgaggtctgatgtgtcaattccgtctgtgctcacataatcagatgcatttaccacgaaggtcatggctgcaggcattgagaaattctccacatctgctgtcatttccatgtattcagggatatttacatcgccatcgagatctccgtccttgattccaaggctgtcctttaagcccggaagtgcatagccgagcaccacgcttgatgagtcgtttacctcagccttgccgtttgtcacttcgatattctcgaagccatcaccgagtacaagtcctgttattgctgcaaatggtacggaaactgtctgcttctcgccgtttactgtctctgtatatgatgtggtgtttgtgtagtcaaaacggattttgacctttcctgattttcctgcaaggtcctcaggtgagatttcttttccatcgaggtagtatgtaaccttctgtgttacaggtggttcctctgttgctgtgccctgatagtaaatgtccttgccaccggcctgccatgtgagcttatcaccgctttgtgtgaatttttccttaccctttacgttctcgatatctgaaaggtttgaagcatcctccaaggtatcctttttgtctttatttttaaggtgatctactacgattgttttgtttacgttgccgcttgcatctgagatgaggtatacgctctcgtccttgtctgcatcgttatcctttaatgatacgctgtccatgagcttatctgctatgtcatcagcatccttgctgcttcctgttgtgctgtctgcctcggctgtgactgcggtgctgttcttctctgcaaaaaccgctgttgctccgattcctgtacctacaagtgctattgtgaggactccggctacaacacggacaatatatttactttttaacttttctttcaattctggtaatttcatgtctcattcctcctgattttgtttttgaggtcatatttttatgttatgagggccaaaaagtattttatccctcatttatgattaatcagattactaagctgtcaggttcttgtttttaaagcctgcgcttgtggcacatattactttgtcaaaaatcataaacattgacggaagtataaatactactacaaacatactgatgattgcgcctcgtgcaagcagtatacagatagaactgatcatatcaatgtttgaataaagtcctacaccaaaggttgcggcgaagaagcaaagtgcactgacgataactgagtttgtcgaatctgcaagtgcctttgtgattgccggctttttgtccattccggtgtatctgttctttctgtactttgtggtcataagtatcgcatagtcaaccgttgcaccaagctgtatggttccgattacgatgctcgcgataaacggaagcttcgttcctgtaaatcctgggattcccatatttacaaagattgcaaactcgatgaccgctacaagtatgattggaagcgatactgatttgaatactacgaggatgataaggaatatcaatacgattgatactgcacttacacgcttaaagtctgtatctgtgatagtgataagatccttggtacaaggtgcctcaccgataagcattgcgtccttgctgtaattctttactatctttttaatctctgtaatctggttgtttacctcatcagatgctgtctcatattttgatgaaacaagcatcatctggtaatcaccgtttttgaatatctcctttgcctcatccggcaccatatcatccggtatggtaggtccgagtattgagtcaagcgataccgcaagctttactccatcgaccttcttgatatcatctatcatgcttatgctgtctgcttttgacatatcgctcggcgcgatgatgatatgtgtggcacccatagcatactccttgtcgagtctttcattggcctgcttactgtatgcactgtcaggcatggttcctgcaaggtcatagtagacctgatcatgagtgtatccgtatattgccgggatgagcactacgatgaaaatcactgcaagtatcttataatgatttgttacccagcttgcaatcctggaaacatcaggcatgagaatcttgtgctttgtcttctcgattgccttatcacatgcaagaatcagtgcagggagaattgttacacatccgataactccaaatacaacgccctttgccattacgattcccaggtcaagtccaagtgtaaagctcatgaaacagagggctacgaagcctgcgattgttgtgattgagcttcctgttactgagacaattgtgtgggaaatggcatgtgccatggctcgcttcttgtctccgtcatatctgtctatctgctcctgatagctgtgccacaggaaaatcgaataatccattgttacggcgagctgcaatactgctgtcagtgccagtgtcagatatgaaatctgtccctgtataaagtttgttcccaggttatagataatagccattcctatgcttaggaggaataacatcggaacaattattgaatccattgtaattcccatgacaagcattgaaagcaatgctgctatgatgacatatataggagcctgctgcataacaagtgtctttgtatctgcgttgaccgctgccattcctgctacgaagcagtggtgtttcaccatcttatccatcttattgacggcttccattgtctcatccgaacccattgtgtcactgtatgtgacgagcatgagctggctgtttgcatccttgttgttaaatgcgtcgtacacctcatccggaattgcctctcttggcaatgtggaatcagcgattgttccgtaccagatgacatcatttacacccttaaggtcctctatgtcatctgccagagtctctatgtcctgatccttcatatcctctaagatcacaaatgacaacgctccggttccaaactcatctaccatgatatcctgacccttcatagtctctatctggcttggcagataagaaaggatatcaaagttgattctcgtgttgataaagctgatgcccgacggtataagcagtgcaaatgcaactatcagtatcagcacacgatgttttacgactccttttccaaatttaatcattagattcaccactctttcttttattcgtattgaagtataaaaaaaaagaccgaataaataaatattcaatctcttcgatttgtcatgtgagatatacaaatccatcaatttgtatatccgatatgacacatatatgatattgtatttgatttctgacactttttcacagcattttcatatttatatgaacacatgcctctttatggtgtctctttatgattctgctttatgagcttgcttaagccgtcattttccatgacaattgtcctctacagctcacttagtatatcatccattgagcgcgtaatcagatacatgtatgcctcagccatctccttcggctcgatgtcatccatgccctgggctatccatccctccgtgataaagcacaacgactgcgcataatatgtagaaatcacctccggtgtgagccagtggtatttggatttctttcctgtgctcttttcgcttatgatattcataaacatctcatagacgcatttcatggcaatctgattaaatgtcacagcgccctccagctttagtgctttcttgtaaaaaacactgtttgccgagatattattgagcatcagcacaatcgcttcaaaaatcattccggcattgagcagtggcttgatgggctcaagcagctcgcttttgataatccactctatcagctcgtacttgtcctgaaaatgattgtaaaacgtagggcggataactccggccttgtccgttatctctttaattgtaatcttatcgattggctttttcgccgaaagctctataaggctctcagcgagcaccatatctattgcattcttaccttgctgtgtcattactcatcaaactccatcgtgacaaagtagcccttctcagtctccctcacatccacgacatcgccctcacggcttttgagcctctcgctgaccacgtagtttcccgacatggcaatcgcatgctctatcgtataataatatgaagtcggaagcttgctctctgttaccttcagatggtcaccgaccttggtaagtccgggtctctccatcttaaactccatacgacgcattctgctgcctttctgttactgcttaattgtcctcttttctatcctcaacaaacgttgactcatactccttttgcttgttgtaagcgctctcagcctttgttgcacggcttgtaatccagatatttgacactccgttgaaaatcaatatgataccgacaacaacagtggctgtcttcattacatcaaatgcatttgtcacgcagattattccaaaaatcagactgattattgaaaaaatcaggccgacactccagcccccgtaaccgtattttctggcatccaccgcctcaataatactcctgatgctgtgaaaaatgagcaccagaccgatgactataggtatcaggctcaccacaacctttggctgtaccagaaaccatatacccactgccaaaaccacaagccccagcatcgctgaaaaaccattcgtaactatattcaaaaaatagctgcacatatagaccactccgatgatgataagcactaccgcaagcacattggccacaatcgtgagcaccgaagctctccatatgataaacaccagtcccagcgctatgcaaagcactgatgacagtagaaaatcagcctttattctgcctaaaaactccttcatacacgacctcctttatatatcatgccctacattacttttctaattctgttcctctgcacttttcttaaccaggtcaagaacagtctgaagctcagcaccctcaaccggtgcagctccatatccaagacgcttgtaatcctctgtaatctcagccagctcagtagttttatcgcccttcgcatcaattacaaaatatctgccctgtgacgcagcatcatcccacacgagataagcacggattgcgcagtttggagccatatctcttgtcgggaaatcgactctggtgacattaagcgtatcagaaatctgcatagacataacagagaaatcctcctccatatatggatacatacgcttctgctgatatgcctcctcgtacagctcatctattagcttttccttctcatcggcaagtcggtccatgaactctttgccgccctcaaacatctttgccggcaggaaaatatgctcatactgcatacgctcaaagatgacatactgctctgctgtcatctgtacagtcttgccctttgtctgtgatgtaggatgtccctctcttctggccttttccactgcctcaatcttttctacaagaggctttttgaaaatcagattgtgagtgaacgggttgaatgcgataccattaatctttgactctttatttgccaccatattgttgactgcaagaaacggcatatttacaatgcatggtgacggatgatccttagaaagctgtgcctttgaggtataaatcggcatgaaagcctctccctcaccgtttttaataaatagcggaatcggcttgttgttctctccgacatttgcaggtaccaggaatctgctcttagtgcatttttcaatgagcttattgagcgtctccgcctttttgtcgcttgaatactgtgtcatcagcgcctcaacctccgggttttgcacctcaagagtgaaggccggatcgtcctttaatttatttttgattttatttttatccatttatactgcttctccttatattaaatgcccggatttacatccaggcattattttaacacatttcttttatcaactcaacaatcttagtgtctcttgctatccattctttatcaagaaaagcgctgttggcctttattatctcatccggcgtagcccatgacagatgatactcaagccttatctcgctgtctgtcatctgtgctgccacatgctcgtccttcacatcacagaaatacacgtaggtgtgacagtaatatatcttgtcagcctcaaatatatcgcgtctcttttctatgaccttgccacactccctgatgctttccggcacgacaagaagccctgcctcctcgcgcacctcccgtgccagcgccacctcgttggtctcgcctgcatcgatgccgccgcccagtatcttgtagtagccctcaccggcctgctgcatggcaagctttccatcccggataataacagcgcgcactgcgaagcgctcaaatacctccatatcatcggaataattgtgtttgtcaaatgtatatagcgttctcatgtttgtcctccgtgtatgggctgtaatcattcattagtatacatggaaagtagtttttattctacaccatttgacggcgaattggaatactattattgaccttttacctgccttttatctgcaaagtaagaccactgtctctatgtgctctgtatatggaaagcagtcatatggtgttgcacgcttcactgcatatccatgctttgtgagatactttaaatccctcgccagtgtttccggaccacatgacacatacactactctctccggcgacagcttgacaacagatgataaaaattcctcgttgctgccggttcttggaggatccattatgacaacatccgctttctcacccttttgtgccatctcgaccatgaattttccggcatcgtcattgtaaaagcggatatttctgatgtcatttcgctttgcattggtgactgcatcacggattgcatcacggtttagctcgaccccgatgacttcacctgcatttttcgctgctatgatgcctatggttccggtgccacagtatgcatcgattacacgctccttgccggtgaggtgtgcctcatgaatggctttttcgtataaaagctccgtctgcaccggattcacctgataaaacgagcctggtgagatgcggaaggtgcagccacacagcttatcctctatgaatcccttgccataaagcgtgatgtttctgtctccgagcaccatgcttgtctttttatcattcacgttgagcaccactgtcgtgatattgggatgctttttcctgagtgcttttacgaaattgttcttcgatggaagtatcggcgatgccaggacaagcactaccattatctgccctgttgcataaccctttcttacaagcacatgtctgagaagcccatagccggtatcctcatcataggtctttatcctaaatgagcggagcatatcctttatgtcccttattatctcatctgactcctgctcctctatcatgcagctttcgatatccaccacatcatgtgtgtttttcctgtaggctcccgccacgatctgaccgcgccttgtgcagtcaaaggctgcatgaaccttatgacgataatagagcggatttttcatgccgacaatcggctccacaaagcaaaaaggctttagcagctttttcatgtatgcctgcttgttttttaactgttccttatattctacgccctgatagtcgcagcctccacatttcttcgcatacggacatacgttatcgctttttgcccggctgcttttctcctttagtctcggctgtccgttggcttttttgtatttcttctcattacgcgtggggttttccctgtaattgccttgatttcccgccatatctgcgctccttaaaatcagctgtgctgattacttgccgtatgtattatataaatacacatgattatctatacagtgccatccgcttgaagcgcctgcagtcacacatatatatgtctttccgcttgctgccttctcatagctgaccgcacagttgccggactgatttacaaatcctgtctttgcaccgattacctcgccgcttgtcatcctgtcctctattcggcgcaggaacagattcgatatgttcaaattctccggatgctgtggtgttgcagccgtgctatatgtatgatttgaaagtactgttttacaaatgtcgtcctgcatcgctgcctgcatgatgaccgccatatcataggctgtgctgtaattgttctcatcatatatgccgacagggtttgcaaaatgtgtggtctggcctataccaagctctgctgccttctggttcatcatatcgacaaatgcttccatggagcctgctgtataaaccgcaagctgatatgccgattctccacctgatggcaggatggttccgttaaacacatcgcgaagaggcacctgctcaccgtctaaaaagcctgttgtactgcaatcatgcacatatgaataatctgtggcttctcttgtaattgtaacaacctcgttgagcttgttttctatcacagccagcctgtctatttcggtgttttcattctccgctgcagcaattgcatttttctcagcctgctctgctgctacaagcactgtcataacctttgtcatggaagccggatacattttctcatgtgcattctttcccgcaacaactgtgccgtcctgctcatcaatcactacggcataagagctctcaagctcatctccgattgcggctgtagcatcagactcctttggcacaaaaagctcctttgcttcctctgtctcacttacctgctcagtcacaccggtcacattttctgtggccgttcctgtgtcttttgccttattactgtctttttttgttttattaaagcacgatataactattataatcgctataacgactatcactgccactattcctacaagcttaatctgtgaagctcctgtattttgtctgcggcgtctgtaattttttctgctattatttctcatatccaatccctgtctcgttgtaactattcatcccacgcacattcgcaaaaccacacttgaataatcacatttcatttttatactgtaacttatttagtatactccctatccggaagctgtgcaataattatcgcaataaacatgagcacacatccaaaaatttctctgccacctagcatctggcccagcagaatccatcctgcaatcacagaaaccaccgattcaaggctcatcgccaccgatgccaccgccgggtttaagcccttttgtccgacaatctgcagcgtatagcccactccgcttgagaaaataccggcatagagaatcggaatccatgcatcccatgtgcaaagcgactgtgtccactgcgctataccgccggcagacggtcccatatctgtaaaaatcatcactatacatgagccaagtccggtgacaaaaaactcaatacatgagagtctgaccgcatctacctgtgatacgaaatggtcaatcacaagtatctgtatcgcaaagcacaatgcccctgccaacaggagcaaatccgagccactaagtgaaaatgtcccattcatgcacagaaaatacatgcctatcagtgcaataaatacacctatccatattttgactccgcattttcttttgaggaaaatcccaagtatcggcaccataagtatatatgtagctgtaagaaatcctgccttgcccgattctgcgcccatgctgattccaagctgctgcaggttgctcgcaaagaaaagtgctattccacagcagcttccggctatccaaagctctttcttttgctttttgctttcaggtctgtttaccgtcagctctttcttatccagtatttttatgaccggcagaaggcagagcgcaccaataaggaagcggatgccgttgaatgaaaatgctccaactgcatcccctccctttgactgcgctacaaaggctattccccagactatatctgccaaaaacaaaataaagacatgtcttgtctttgaggctgtattcattataatagttcctccgtgttattaaaatcagagatattatatcaccgactgccttgagttgcatacttaaatatgctgttacatttcgtttgtatataaaattatacaaaaaacaggcggcaaacaccctctttgggtattcgccgcctgtctttatatcttattgcgtaacactattatttacgctattcttccagcttaaaatgctttatctctccgtttcctgccacatagaaatcattatccttataaatgcctctgtagccttctgtatttttataggtcagtgcctgctgctccaaaagactaaagccgttttcactgtcatacgaaaacagatagtagtcattcgcagtaaatcctatcagatttttctccgggtcagcaagaatagccttgtagttgtatacaaactcattactccagctctcagaactgtcgataagcttctggttcacctcaaccggctttgtcggatcactcacatcaaacatagtaagctttatcttactctgctgcgaatcaccatagcctattccaagtacgtgcgtatcatcccacatatgcagatattcagaaaatccactcacctcaagctctcccaaaagctttggtgctgtcggattagatatgtctgctacaaaaagaggatccgtctgcctgtatgtgatgaaatatacgtattttccaacaaagcgggctgcgtatatactctccccgcgtgcaatctcgtttatcacaccgacctcattcatatccttatccagcacatgaagcgaattgacaggctgactgccggtatttgaggttggaagcacatacagataccctccctgctcatttattgcaaatttatcgttaagataaccattcactgaagtcgtctccccggtcttcatcactccatcctcaaacgaaattttgctgattttggtaagctcacggcttgcactccaatcagaatgatacagatacatagcattgccagaaacgtacacctcgccgctattattcataatacattttgcatctattgtcttatcaggtttatccacatcaaagctcgaaataactgtgcctgagtatgtatcctctcctatatagaagcagtcatagcttatcactttgccatttacctgaggcacccatttctccagattatcctcctgcagcgccacatttttattcatatcggaggtctttatatatgtgtccgaaaaaacatataccgtatcgccgattttgcgcgatgtattgtaaaatccatcctgacgtgctttgcctataagcaccggtttcgtcgggtcagctatatcatagctatagcatatagtctcatccttatcgcccgcatggtttgatatgataagcatttttccgtcactgatataaagctcctctacagtatctgacggtacctcaaaatcaggacgaaacagcgtctcttcccccggctttccatttgaaatatccgtgatggatatctgaccatcctcgaccatgtaaatgtactttccgtccgtctttaccacatcactctcatcaacgccctctgtcatcacgttggtggttgaatactctgttttggctgccgcctcctgcttatttgcagacgatgcatcagacgtaattcctgttgcatccgcactctccagcaagtctccagatgcagtattccttatggaagcctcagctttttttgccacatcatacaatttcccgtaatcagaggccgcttcataatccccaagctttgcaccgctctttatccctgcatagacattattctgtgcattattctgtgaaatcacatttgcagtttttgtttccagctcatctatacggttattaagccgcacaacctccgtgcctaagactgcaacaacaaggactgccgccactgtggcaagcgcttttgctgtccgtgcaaattttttgtgctttttcctgtttttgtcttcttttccgccgtgatgggtttcatgattttttacataaatttcatcactgtacccggccgattctccggtcggctgcgcttcttcaattatttggtcatcgatgtaatttaaaccatcaaataaatcctttttcgtcatagatatacgccctcctcatccagatattttttaagctctgcccttatccgaaacagtgtggtctttacgctgcttttgctcctgccgctcatatctgccagctcatcaatcgtcatgccataccagtatcgtctcacgaaaagcactctcttttccgtctccagtccgttcagaaaatccgataaacaccttccaatgtccgacagctcgccctcgtattttgcattgctgtctgcaaggcactcctcaagctcatcaagcatacagttcatgttggaatttctctttgaagcgttattccagtcaatcctgtcgcagacgatattgcggcataccctgtaaagccaggaaaggaaacgcatagggcgctccggcggtatcttgttccatgctgctatgtatgtgtcatttacgcattccagcgcatcctcatgtgctaccatagtgtctgcaaaccgggtaagcttcgctccgtacatctgcgaggtcgcactgacagcctgctggttgcgatcaaaatacatatcaagtatctgttcctgtgtgtacattttctgcaaacctcccttctatatattatgtaggaatttgtttggtgggggttacatttcatcattaattctttaaaatttccattatgtaaactttaagcctagcctctaggaaataaagcttatagtgctgaataattgaattgtatcatatttcgtcttggattaaatatcttgttttaaaaaagccgttgacttatacacacttaatgtgtatattatgattatggaggaggcatttatgaaacaaagagagcttatcaagaaactagaggctgccggatttgaattttcaagacatggcggtaatcatgatgtatatgttcggggttcagatatagagcagattccgaggcataaagagatcaacgaaatgcttgccaaagcaattttacgtaaatggggattatagcatttataatttatcacatattatatatacattaatttatggaggatattatattatgaaacaggtatatccagttatatttacacaattaaatgataaaaaagacaccgtgcttattaatgttcctgatatgaatatattaacagagggcttcggtctaccagatgctatagaaatggctcgcgacgccattggagcaaacggaatcacattacaggatcttggcatggaaattccggttccaagtgatatttcagatattgacatcaaaaacggtccctttgacaatactggtattagtcatgtttcatttgtggatatagattttgatgaataccgccgcaaggtcgacaataaaaccgtccgaagaaatgtcactctccctaattggcttaatcaggaagctgagaaatcccatatcaacgtatcccgcgttttgcaggaggctctcatggtaaagctaggtgtatcaagataaataaagacataataataagccatgttctcaccgctgtggtggtaacatggcttatttatccgcttaataaccaatacatacacttcatttacaataattttggtaaaaagctatatgatcatatactgtctgccaggatttccctgccattccggtaacacaaatatatttattatttgcttcactttcatacatacttaccgcacaatatcgtgactgatttacatatcctgttttcgctccaacaacttttccttttccaaatttacgatctattcggttcaaaaacttacttgaaaatgttattccctgcggatgctgttgtgtacatgaagttgtataatttcttgctgacaacacctttttacatatttcattttccatcgcagcatgtaaaataaccgccatatcacatgctgtactataattattttcatcaaatatccctacaggatttgaaaaatgtgtcgtctgtgatattcccagctcctgtacttttttattcatatcatccacaaacttctccaatgttccggatgtcataattgcggcctgatacgcagcctcagcacctgaaggcaatataattccatttaataaatcctcaatagtaacctgctctccaaccagaaaccctgctgcactacagtcgtttttaaaagaataatcagttgcttcaatagaaatttcaattttctggccaagactctcattatttaatttctccgctgcaaccaaaagtgtcataacctttgtcatagatgccggatacattttttcatttgcattcttagaagcagtaatagttccatcgtctgcattaaccagcactgcatattggcttacaatgttgttatcagaagatacatctatcgttttatcatctgttgatggtacaaatatatctgattttttttcttgtaattctgacgtctcaattgtagtctttttctgaatatttatatcatcagatacattttgactcgaatcgttcttatgtttactgatttccttagtgcttaaaacactgcacaccactatcaaaactatcaggcaaatacatgctattatttttgttttcttcactggtattttactctgtaattgcattataaactattgaagacacgttatctccatcaaatataaatgaaagctggctgtctccttttttgtaaatatacgaggtctcagttgagtcagaagcatctccatatttttcctcaacagcctttttatcagaacctattgatattccttccggtgttgatactgtatcatcaagtaattctattgtataaacataatccttgttatctttaggatatgttgttatcttaacacttccataagtatataccttatcctttccctgaaaagcacaggaatcagattcaaagtaattatctgcatccccaagtttttttaccaatggctccatgttttcattcatggcaactgttacaccctttaaatcatatgtaaatacatcctgttttgtctcagaaccaacatcttttttatcattgtcggactctttacttccacatgctgtcatcatagatactgaaagcataatacataacattattgaaataattttcttcatcgttcttcctcctaattttgaatcgcatttgcaccaaagctcttcaattcaccatatttgttcaattcatcatattgttgttgtttcatagaatcatatgcagcttcttttttatcccatatagaagcatactcgctatcatttctgtaatcagttaaattataattttcaaccagatattttccaaaataatctgccattttttcagcgcctgtagtattaagatgtaaacctgcatcatatgtatcctgtgacatatccaggcctatatcattttgcaatggaataaaattgatgtagtcaacatcattttcatcagcaaactgttgcacctgttcatcccattgctcataccaataaggatattctgtaggtgcctttataagtacaagcttaacccctttttccttacataaatcagtcattttctgtaaatatcccattgctttatcaccaagcttataatcggtaagtggtgttggatccggaaattcctgttgtggctttgtatcaacacgcatataatatccattatgagtcactttgtctttggaaaaaatatgtttcacatcatcttttgtaagctcagaccatctggaatgatatctcaacagcggaaaaatataatcaacaaaattttcctcatctgtcatagaagccttaatgtcatttacctttgacatagaccatttcatcccatctatagacattctgttataagcttcactctgaggctcattatattttaatgccaaaacattaaacaccaccactttaggagtctcatgtttcaaggcatcctctaataaataatatgactgccatgttaattgctgtgcacttcctctgatgtaacttgttattccatattttctccataattctatggtagaaaaattctcataaacctcacaatcgcccacaaataaaacttcgtgatctgacctatccttatagtattcttcaaccatagagccttcaactattcctgtctgatatttgggaaccagaagcctttgaacaatatacagagctccaataagcaggacagcaaccaaaatgcatgctgttattttttttcttctcatcgcactctccttaaaactgattgtagataaactgagacgaatcgtagcctataccatatgcgccaaacactataataagcataatcataacagccataattccaaaataaacaattggaggtttttgtaacaaaaccgttctcacatttcctactcttaccttaaaaagactcactgtaaaaactactataaatcccactataagtacaacataatcagccacactaagccctatagaaagcagcgaaccattaaataattcacctatattgaactttgtaaacattgttccaaccatcttaaaagtcaaaggaacatctctatagcaatcaaacattcttatacagctcatcaataaaaatgttcttagaatctgaaatgcttcatatggaactttaccttttacactaaatcttttatgaaacttttcatataaaggttccagttcctgagagaccataataacaacaaagttcattaatccccagacgatgaagttccatgctgcaccatgccataatcccgttgtaaaccatactacaaaggctgacaaatacactgtcacccgcttaccaattacctcaccaaaatgttttcttgaaaatttagacaaattaagcataggtttacatactgaaataggataaaaaatataatctgtaaaccatgtacccatagttatatgccatctgttccaatattctttgatattttttgagaaatatggaagattaaagttttctgtcacacgaatacccataacctctgctataccaatcgtaatatcaataccaccggtaaagtcacaatataactcgaatgcataaaacaacatggcgataaacacatatgctccttgatattcagaaggactgtgtatcagagttgttactcctgtaataattctgtctgcaataacaactttcttgaaatatccccacaaaatccgcatcaaacctgatactaccacattgctttcaaaataatgctttgaaaataatgtctccgataaatcatgaaatctgcttatcggtccctgaaccaattgtggaaaaaatgaaacaaacaatgccagcttaaagaaattcttttcaacactctgttttcctctatacacatcaattatatatcccatagtctgaaatgtataaaatgaaattcccatcggtacaatcatattgacagtatgtaaaccggaaactccatgcagcatatcattaatattttgaatcacaaaattagtatatttcgttacgcttaatataccaatatttatgaaaagacatatcaaaagccatatccattttttatgtttcatatggcttttataattctttttttgctctctgcttaaatttcccttgaattctttaataaacttatcctgcgccatattaatctgattcattttaagacttatcaaataagttgatattgtcgtcaccagtatgaatatcagatatcttggatcggcaatgaaataaaaaatataactaaataccaataataaaggccactgacacgattttggcaccagataatacaggacaaaaactattgtcataaatgctataaagctataagatgtaaacagcatatcttttattcatcctctaatcttactattaaatcatacaaggcttttgcagaattaaaattctccggaataatctcctctgccggaattgcaacatcaaatgaatcacttacctcagatataattgaaactatgtcaaaggaatcaagtatcttatcatcaatcagtgttgtacaattttcataatctacatcagggtgtaattcctttaaaatttctaataattcgttcatcttttttctcctttatctttcctgtgcttttttcattaaaaatactctgtctattttcccatttgctgttaatggcatctgctccagtttttctgttttatttggaatcatgtaccttggaagcttatctttaaggagcctaaccaatttatcaggttcaagttctccgatataatataaaactatctttcccttttccttatcgtaaacagcacatgatgtggatatttcttcaatcatattgacatttacctctatctcaccaagctcgattcgatgtcccatgtgcttaatctgatagtcctttcttgatacaaatatcagttcacctctttcattcctttttcctaaatctcccgtcttatatatcaattcaggatatctcgaattgagaggattctgcacaaatacctcactagtcttttcaaaattattgtaatatcccaatgttaatgaagttcctctgacacagatctcaccaacatttccatcttctaccagcttattattctcatccagcaataatatttctgtattatggaatggtcgtccaattggcaccacctcatccaactcaaactctcggtccacctcaaaataacaacacattcctgttgcttctgttggcccatacaaatttacaaatctggcttttggcaaagtttctctccatattttcaactgcttaataggaaatacctcactaccaaacgctatagtatgcaaatatttaggtttaatcttgttaaaggtcttaaatgccgatatcatggtcaatgctgacacaacccagcagacagtatttatcttatactcatttaaaaattcaaccagttttattggaaacataaacaaacttttgggaacaatatatgttgtagcaccaaatttcaatgtcggatatagttccttaagacacgcatcaaaatataacggtgtctggtttgcaaatcttgtattctcattaaaacataacacctcagacagattttcaatataatctataaccgatctgtggcatgctacaacacccttaggaactcctgttgaacctgaagtaaacactatataaataggatccgtatctagctgtctatcccttattccaaataacagctcatctgaaatctcattttttcttacatgatcatataatagaatttttccattataatcaaatttttcaacggcatttattgttgtatcatcacatatcattactcttggatgtaggttttcaaaaataagtctaatcctgaattccggcatttcatcatctataggcacataatagcagccaccataaacacatccgtaaaatgctgtaatagcatgtggatgctttttcataaaaactactaccggttctttataataattgttatttgccaaataacttccgatagctctgctatcatggtatacctcaccaaatgtcatttccatattttcatttgcataggcagtcttatccggaactcgttttactgtattttccaggtattccaaaacatttgtaatttgcatctttttctcctatacttcatatcaaaatactttagttgaatggtacaaacagcttattgtatttcggtttaactcttttgttacactgtattaatgatgattttgcaagaacctccattgcatctatgacccctgttttaatatcatattgttttttcagtaatgaaagctctgtacatcccaggataattacctgagctcccttgtttttcaaatgcgtggctacaacattatacttttcaatgtcaggaatctttcccgcctttatatccttatatataatatccatcactattctctgatattttttatccggtacaattccatgcattccattcttttctatttcattttgaaaaattctactttgaattgtaccatcagtagccattattcctattttcgttaatcccgcctcttttaacatatatgaggtgtcccgaatagcatgaatcaccttacagcccgttttttcttctatttcatcatgaaaataatgtgctgtaatgcacggaatagatatacaatctacattctgttcctttagttttttcccgatttttataatcggaacaacaggatttgcattactttttcctaagatatatgcagttctatccggtattgatgggcaattataaataatcatttccagatgatcctgatcacattttgcatcggtcatattaataagcagttccataaaataggcagtagccatcggtccaagaccaccaattataccaagtctcatttattccaccttatttgtttatcgttccctttgcataatttattttgtcctgtactgatacagtcgctcgttcaggatacagcgaagaatcaaaaatatgactatttttatgcttggtagaatacgctgccagttctgcatccgtcaacatgaaaaaatttcctccaccttttcttggagttgcatcaaaatgataccagccatctccaagatttatcaggctccaataatgtgctgaatgtgaagtatcacttttcactatatcaacattttgtattccacaaacatcaagcatagcttttgctgctgcataataattgaaacagtctcctgattttttcgtaaatgcctgataagctccgattgtccaactatctttgttggatgttcccgtatatcctatgtttgtttttgtccatctgtatattgcaaacgctttttccatatcagtcattgaatcattagtaatctggtcaacaaccttttgcgcaagagcatatacgtcttctttatctacatatcccttaggcttctcttttattgtaatttttgatgatgcagacgatgtatttcctgcactatctgtagctgtatatacaacctcatatgttcctgctttattcagattcactttactgttatcaatatcaagtgttggattctgatccatattgtcagtcacagtcacatcttttttatatgagaccgtttcacctatatatgcggttatatccttaactccctcaatcacaggtggctgtgaatcactcacaaccgttagtttagcttttacctctttctgattttttccttcatcagttaacacgattatcacttctgactctccgtcttttgatacatcgggcttatccttaaagctcacatcaacctttgttgcatcctttatatccgtcacaaactggtttgcctcaatttgtccatctttattaaccgtcacatcatttgcctttgcagtaggtgcttttgtatcttcaattgtcaattttgatgtatattctttttttccaacctttacaacaatttcatggctgcctatgtttcctgtattaatctgtgaaacgtcagtcacaaacttagcatctgcattttcctttttcaggaaatctttaatgttgatttcactacctgcctctaaggttacattcttttttatctttgacaaattacttattgcaaggaacactataaaaataaacacaattagtgtagcaatacacatacctgtcattttaatcctctgtgcacgccttcttcttgctctcattttttgtctttttttgtttctatagtcgtccatttctgacctctcatgtataaaaactaaattttcttctagtgcattgtatctcttaaagtgtagtatgtcaacacttaaagtgtagtttatatgtataaaacaacccctattgcgtagaattcaatattaaaatatgtacactaaaagtgtggaggttcgctaaaagagtatgataaagaatttagctggtagactaaaagaattgcgtattcagaataaattaacacaaaaacaggtttcagagctattgggcatatcaccaagcatcatttccggttatgaaaccggagaacgcacacccagtgcagaaattcttctttctctatcgtatctgtataaatgcagcacagactacttacttgggaaaagtaatgatatgcccgcaattttactagacaccaatggactgacacctagccaaatcaaggccatttctgcactgattgaatctatacgtcaataattcttaatcgagtaggaggcggtgactaaccgccgtcctctcacagcaccgtacgtaccgttcggtatacggcgctttcaatagttgacgtgcacagactgataggctgtggctaaatcataaaagccactgtttatcagtctttctttattcagcgcccaaatcacagctttgttattgctgatataccaatactttctgcgactgtttgctattgttgacgcatagtgttctgggattccaagtttgactagatttttatatttcgttctaggtttcttccactgtttccatatgcacatgcgtattctgtgatagagccatccgttgatgtcatctatgttgctcttcatgcttgcaattccgtagtagttaagccatccccttgcatacaccttgattttctcaaggcttggcttgattgactgacatcgcttacgggaagataactccttcaatctggacttaaacttcttccatgacttcggatgaactcggacataagtgcctttcccgttccttcccaatgcaaagccaaggaatttaaaatttcggattgcaaacacgctgacagtacggctcttttctcggttgactgtaagtttcagcctcttctcaagatattttgtactgctttccaagagtctctctgatgctcgtccgctctttgcaagaagcacgatgtcatctgcatatcttatgcatggaacacctcttttcaggaactcctggtcgaactcattgaggtagacatttgccagcaatggtgatagatttccaccttgtggtgagccttcctctgtgtcaatgaccactccgttttccattacaccgcttttcagatagcgctttatcaactgtactacacgttcatcttttacattcttccggagaagattgatgagaatttcgtgattaagagtatcgaagtactttgacaagtcaaggactacagcgaatgtatagccttgttctgcatactccttaaccttaagtattgcatcttttgcacttctgttcggacgatagccatagctaccatctgcaaacagcggttcatagattggcactaactgttgggttattgcctgttgaagtgtacggtctatcactgttggtatgccaagctttcgcacaccaccatctggtttgggaatttcaactcgtcttactggagacggagtatactttccacgataaatgcggtcagttatctcttgttgatgttcctttagatatggaagagcctcttcaatggtcatgccatcaattcccggcgctcccttgtttgccttaactctcttatacgctctgttaaagttgtctttatacagtatcgtttccaaaagtctcggctgtgcactgtctctttctttccatatccgattgaatgacctggacgctttcacatacccttcatgttccgcattatctctttgcgaacagccattgttttcaatgttttctgccatagacggtcattcctcctttctcggtcatactcaagactcctactgattcggtccttcacctctcggctactatgacctctgctgacttctatgcgttcagcattgctttatgcaatggttacctctttcaaggcataccgcacagacctccctaggtaccacacgtttcttcctctccatccatctgcctcatttatcatgcatgattccgtgtagttattgggctttaacatgggttgctgtcttacccacatgcatgacctcatatgagatttctgttcgtcagaccagagatttgcccgtgagttggtatattcctcacatccagcttccttcagattccatctcacgatggacacccttgccttcggctatatccttcccactaccgggcggattcgggactttaacccgttagaaacgtgcgccgctaggcgcacaacataaaaataagcgtggagcccggtatgtccaggctccacgcttattagaatgccgctctgtaaatctccacaatatcgtccttgctaagcggtacaaacgatccctttgaaccctcgcaagccttctttgccatcacctcaaagttcctgtcgtctgtgattcccacagctcttagatttgccggaatgcccattgtctcaaagaagaatttcttcagtgcatcaatgcctgcgtgtgcaagtgcatagtcatcatcaccggaaagtccccagacattttttgcaaactccacaaacatcggaagtgtatcgtcatttagtatgtgctccatccacgccggtgtgagtattgcaagtccctctccgtgagtaatatcatagaaagcgctcagctcatgctccataggatgtacgcaccatgccggtgaacagccatcgcccacaacaccgttgattgcatgtgtgcctgcccacatcaggttggctctggcctcgtaattatcaggctgtgcgagagcagccggtccatttttaatcattgtgcgtaacaatccctccgccataaatttctggcagtcagcattctccatagaaaaataattctccattgtatggctcatcatatctgcggttcctgctgcggtctgtttttttgatactgaaaaagtatattcaggatttaatattgacatggttggcaccatatacggcgatcctgttccccacttttcatttttagacatatcagagataacagcaaaaggatccatctctgttcctgttgcggaaagagtaagcacatcaaatatcggaagtgccgccttgacctttgagccatcaagcaccagatcccatgcatcaccatcatactttgcacctgctgcaacaacctttgagcaatcaattgtactgccgcctcctattgcaagcaccatgtcgataccctcatttttacagatttcaacaccctttctgactgtctcaatctttgggtttggctccactccgctaagctcaaacacggtcagccccgcatccttaaggatcttcattgcggtatcgtagagaccgtttttctttatagagccgcctccgtacactaaaagcaccttgtggccatatgccttaagctctgataagttcgaaatagtatcctttccgaaatggatttttgttggaatgttaaatgtgaaattgtacatatataatacctcctgctaaataattatattttttaatctctccatatcatctgcatcgggatgcgacaaagccttgtcaaaattttcaatcagcgcatcaatattatccggatgctctgggttttctttcattttcacatagcgttccctcacagactgtggcattttgccctgacacatatattctcctacaatagtgttgcttgaatcaatggcgcttttaacattgccaagaatcttttgaaaatatgcatcacttcctccaaaaccggctgttccgaacagaaatatctttttatttttcaatttagataagaaatctaatgtatcactatctgcgtttcccttgtccgtccaaaatccaatgtatagcaattcggattttatcccctgcgcatcagccgtgccaaaataatcacagctctcctttggcaggatttcatgaattttatcagccagcttacgtgtgttgcctgtcatactactgaatattatagaataattttcgttgtacatgcaatattctcctcctaatatataagtgtagggtttagataccccaacagccagttgggttctatccctcttattgctaaagctgtacaatgatgaggtatcggtctgacagtattctccttggactcaatagacgtccgtatgaaagccagtcagccagcctatcatttgcagccgttcgatttatgcaggttggactgccctgtgcacgtccgtttgataccccaggagattgaataagcaatgagaaatagctggacaccatacaaattcactttcggaggtacgagaatgtacaacgcagtaggtattgatgtatcaaaaggcaagagcaccgtcgccgtcctgcaaccagcaggtgttattattcgtaagccttttaatgttaatcacacatccagtgaactggatgagcttgccaaatatattggcagtctggaaggtgaaacccgtgttgttttggaatgcaccgggcgttaccatgaaccagtggtaaaaactctttctgaagccggtttgtttgtcagtgctgtcaatccacatctgatcaagaactttggcaacaactccatccgcaaagtcaaatccgaccctgctgatgcgaagaagattgcacgctatactcttgacaactggatagaactgcgacagtattcaagtatggataatacacgtactcaattaaaaactttaaactcacaattcagcttcttcatgaagcagaaggttgccgctaaggctaacctgattgcactattggataatacctatcctggtgtcaataaactctttgacagccctgtccgcgatgatggcagtgaaaaatgggtggattatgcttactcattctggcatgtggattgtgtccgcaaaattggattaaaaacattcacggaacgctatcaagcattctgtaaaaagcatcactataatttccaaccagcaaaaccagcggaactatttcttgcatccaaagaccttattgctgtctttccaaaagaagcgtcttataaactgcttattcagcaaagcattcagcagcttaatcttgcttcttcccatgtagaagaactacgttcaaagatgaatgaacttgcttctactctgcccgaatacgcaacggtaatgggcatgtatggcgtgggaaaaacttttggtccccagcttatagcagaaataggtgatatttccaatttctcacatcgtgaagcattgactgcttttgccggagtagacccaggtgtggatcagtcaggcacccacaattcaaagagtaataaagcatctaaatgcggttccaaccgtctaagaaagactttgtttcaaatcatgtctacactgcttcaaacagctcctgaagatgataaggtatatcaatttcttgtcaagaagcgtgcagaaggaaagccttactatgtttacatgactgctggggctaataagttcctgcgtatctattacggcaaggtcaaggaatgcatccgtaatttagagcaataaccaagtctaaactcatttttcttcaaaccggcaaatatggcggttcaaaacttgtgcccaaaatcacaatcataaaaataattcattttactattgactttttattagcaggctttaaattgaactaattctcgtatcataatttctctcagcatccgatcaacactttttttccgcaaaatgcaaatccgtaatgcttgatattattctcagatattcccctgtccagcaattgagtatcatagtttttctcatcaatttgtctgagcgctgccgcaaccgtatcttcgagtccactttcttcactgtcatcaaacaccttaaactccataacaaatgcgtcacgtcccttctccctcggaaccagaactacatcatatcttccaaagccactttcacgatttgaaaggacttcataattatcacgtatatcaaccaaaagtccaagcacaaagccatgataaaaacgctccggctgactacggtctgatggatgattgcctgtatcaaaactactaaaagtagacatcgccacatcattcatatacacgttcattgcttttacatccccactaaataaagccttcacaaattcattatagttggatgatacatccgcaaaccatcctttgaacagattagaaaacatacttatagtctcaagattcgttatactaagtctataccagggctcaagagtaattcccttatggacaatgctatcaaccttcagatacccactcgccagaagaagactccatatagcgctctcatctttttcgagccggttgaatactatctgttcatcaaaattaacctcaatactctttccattaaccagactttccatgaggctctttatctctgcagatgattcctgtataagtctgcttataagagcattggagctggtagcagcccaataaggctttaactttttttctttcaggaaattagtgatagaccatggattatatatatctttgagcgaaccaaaggtaaatccatcataccactgcttaacaacagcttttttatcactcatgccatacttttcaatcgactcaaaaacctctttctcagtaaaaccaaagcaatcagcatattgctctgatgtagtcgtaacaactaccaggttattcagatctgaaaaaacagactcttttgagactctcgtaattcctgtcattattgcacgttccatatatgggttggtcttaaaagtagagttcagcaatcctctcataaaattaacgaattcatcccaatatccatgaatgtaagcttcctgcataggtgtatcatattcatcaagtagaataataaccttcttcttgtagtactcgcttaaaaaatatgacagatctttaagggaatcctgagctgttacatcatcaatcctatctgtcatgtctgacagcttacgcctgtcagctactgtgaaatcaggataatccatcagataacgatactgcctgtatacatccgcaattatcttcttgaccttctgtaccgcatccttataatttccctgctttacatcagcaaagcttataaatataacaggatatgctccctgtagcttgcgatattttacgctgttccatatagaaagtttctcaaaaatctcacttttttccgaataatgatttgagaaaaaataattaagcatactcatattcagagtttttccaaagcgacgtggtctggtaataagcgtgatgtcatccgcactctcccaccattgcctgataaaatcagtcttatctatataaaaataattgttttcacgaaggtatagaaaatcctgttttccaatgcttatagtctgtgccatactttcttctcctaaaatcatatatgcctattatataattcttttgaaacgattacaagcaaagaaagataccgcttacaccccataacaacagcttgcgcgagaaataaaatccaaatggtaatggcagcacagaaatcaaaaatattataatataggttaaatatacattacaggttctttatcacttcaactctggttactacgccttcgcgcatactatccactctaagtgcacaatccttataatacacgcatgcacctattgcaaccgtctttccctcttcactcagcttgtcgcttatgacactgcgaagaattcttgtcttttcctccggaattttagctccggttatgagattcgcgtgtgctactgtctggctgccccggcatatcatgtgatctgcctcatcaaaactgcagaacaggaattttctgattgcaaacaatgctgctatcgcgccaattccaacaagagtctcatatacattgaggtgctcgactatcatctgtctggctgttgcaaaaagcagaacctctattatcgtgcctggctgatgcgtacagagcatctttacaaactccacgcctatagcaagcgacatggcatattccatgtaatactccaactctagcttgtcatgccatatatcaaaaaaacattgacctacaagctttataataagtatcgctatcacaaatacgagaaatgcagacaataccagttccacgtaagtcgctatgtttttcatggttttccttaaaaattgtttcatcattcgctcttcctctcagttattgtattattgaatgaattgctcccgggatgctcatatccacaaacagagctatcataaatgatagctctgcctgtattgttagtatctgatttattattcggtgtaccggcaaatatttgctgcttcaggacactcaattcttagaacaggaatgccacactgcatatagaaacaactgcaataagtataataagtaacggtccaccgatttttacgaaatccgaaaacttgtatcctgccggaagtatctgcatatttacggctgttccgaaggatgttgctattgcaaggtttgagcaggcaccgattacgattacccatggaataggactgattccaagcgataatgcaattgctatacagattggtgtaagcattgctgctgtggcattgtttgacatgatgtttgtcagcacacttgtaagcactgcgataactactgtaagaagcacaaccgatgcgttctttcctccgaagaggttgagtacagcgtttgcgattaatgctccaccacctgatacatcaagtcctgttccgattcctgatattgttccgatacatacgaaaacatcccaaggaagatccgaatatgcttttttaatcgagatacagcctgttccaagtaccattgcagcacctataagaccgattgtaccaatgttaaaatagctcttgaaaggctggaaaccacttaatacaaacaatactatgcataaaatcatggttccgagtgccacatagcccttccatgccggagcagctgactcctgttctttctcgagcttatgtatctctgcaactgaatacatatttcccttgtcgaagtcaggactatccggttttaataccttgtcgaggagcttgtagccgattgttccccagaaaataatctgtacaactgctgccggaaacatgatctttgtcatgtcaaacattcccataccttcctcataaccggcatatccctgtaataccgagtttgctgcaagctgtgaggttgagccgattagtgaacacgcacctccgataatggctgctgttccggctgggaaaataaccatttttgaacggatttttccacatgagtttgctgctacgattgcgatgataggcatccagatagcaactgttccgttgttactcataaatgctgacatcaatgaacacacagcacttaccgttactataaaccgcctctccgtcttggcaagaaaagaatttccgattttttctcctatctttcttgctattccggtttcaaaaagtgcggcacttacaacacacattccgactaccatcggccagcctgttgcgctgaatccgctgtatactgcggataaatccatttctggaataaacattgccattgctaccgacccaaggatagcaaccacgcttatcggcagtctattccagacaaacaagcccattgtaattaatacaattataattgaaataatactagaatccatattatatcccccgatatatttttattttaaatctctgcccagtcagcacccttccatttctcgtgctcatatactgacttgtcggctacatatggccactttttaccctctacgactgccagacagcccttgatacacatctgtgccatcttaataaccgcctctcttgtctgggctgctgagtgcggacttacgataagatttctgcagttcaataacggatcatctgtttttggtggctcgctgcagaatacgtctgttcccgcaccggcgataactccgttatttaatgcttctacgagatctgcttcgttgatgattcctccacggctgcagtttattataagtgccgtcggcttcataacagaaagctccttctttgagatcatgttcctggtctgatctgtgagcggtacatggattgataccacatcgctgtcctttaacagctccacataatcttcataatatttagccccatagccttctacctgctcttttgtcataaaaggatcatacgctgcaattctcattccgcagcctttgcagattttggctgtttctcttccgattgctccaagcccaaggattccgactgtctttccctcaagctcgaaagccttctttgctccacggatttcccagtttcctttgcacatctcgttctgtgcctcgataagattctttgacaatgcaaaaatcattgctaccgcatgctcagcaacacttctgttgttggctcccggtgtgatgaccaccgggataccaagctctgttgctttttttacatcaaccgaatcatatcctacgcctgtacgtccaattaccttgagcttcgggctgttttctatagcatttgcatcacattttgcaattcttacaataagagcagctgcatccctcatctcgtcaagataattgttcggatcctgattgtcagctacatatacatcagctattccatctaaaagctgcattccttcatggcatacagcctgtgtcattacaaacttcatattaattcatcctccccagagctagttcattcctttgtcagcattctcttttaatacctttgcaagcgcttccacaccctcatcgcacagatagttgaatggacgtctgcaatcgccaacaggatatccgagcatagcaaccgcttttttaacaactgtgttaggattgccgtatttgaataccgctctgaagcttgcaatagaatcctgtgctgcctctgcctcctcaagcttgccttctttgaaaaggttgtagatggatgaaagaacatgtggataaacatttgagcatcctgctattcctccgactccgccttcttttaacgcaggaagaatgagtgaatcatttcctgataatacatagaacttcttgtcaagttcacgtgtctctgtgatatatgcctttaagttatcccagtcaccgcttgaatccttagcaccgatgataaggtcaacatcctttgcaagcttctttactgtctcaggaagcagcttgtttcctgtacgggcaggaatattgtaaagaacaattggagtatctacatgtttggcaacctctacatagtgatcgtataactccttctgtgacgcaaccgcaaagcttggagtgattattgaaaggacgtcagctccgagcttttctgcctccttgctcatcctgatagtatcctgtgttgaaatgcaacctgatccagcatatacaggtactcttccttttacctgatcaattgcagcttcaaggacttcgcatttttctttttcatttaagatatatccttcaccgtttgttccaaatgggaaaattccgtgcacaccgccatcgataagtctgtcaatctgtgttctgagctcgtcagtgttgatgctctcatctgcgttcattggtgttaaaattggtgtaataattccttttaattctgtctgtttcatgtttttcttctccttttaaacttgtttaattttgtttatttttgatttaatattttgtctgcaatctttaccagtacatctttggttccgaacccacctgatttggatattatctgctgcacaaatccgtgatttttcagattggaaacaaccacaccctgttctatctcacataccggtgtaatctgggtacagcctatcagcttcatataccccatcaaagtatcgccgcctgtcataagtattgtcgtatcctgcctatttgctgccagatggtcagctatgtgtccatgtgccgttggaatcagggttcttacatcattcatagtcagcttatttgcttccataaagccctttttgtcttcttcccggtctatggaatcaatgatgagacatctgtctttttcacattcttcctgcattttgcgcaaaaactccaagcccgcctgcgtgctgtaataatccttctgcaatttttgttctacggtcatatggattcttgaaaatccgtgttcttcggcatagtcaagctgattttgcgtaatcatattcaagctgccacattccacaagaaaattttcactcttcctatagctttgcggcttcgctgcatcaaatctgagcttgtcggcaagcgcttccgcaagtgcggcacatccggcaataatacaaagctcatctttttcctgcaattcatcaagcctttcttctatgtctttgtgtttttccacatcgcagattacgatacgttcatcgctttttatatcattcaaagctttattccgcttaacacaggcacatttcaaagctgtctgctgtgcgataatatcaggtatgtacgacagctttaccggttcaaacggatcctgcccgaatacacttttttcaagaagctgcccctgtatgtagtgagttccgtttaccgtacagcggtctatcttcggataccccggcaggaaataaactttgtcgtgtccgcttccgtccaaaactgcctgaagctcacttcctatatttccgcggagcgctgagtccgtttttttgaaaataacaggaatcttaattgcttttgcccatcctgtaatattttttacagcatcatatgccttagctgccggcattggtctggtctcagaatctataaccagaacctctgtcgactcatctatatcccagatagcttccggcatttttgtaaatacctgggtggcaattcccttattcacaaactggattccggtatccaatgcaccggtaaagtcatctgctatgatcaacagctttaccatcgcatttcctcccgctattttttgtttactgcaagctttgtcgcatagtcaattgaatttacaaggcttaactcattcgattcgccttttcctgcaaggtcaaagcccgtaccatggtctaccgatacccttattacagggattccgagtgttacatttacacctgctaccgcatcccatttctttaattctttgttgtatacaaagcctttaaccttcagaggaatatgtccctgatcatggtacattgctacaactatatcataccagcctccgattgccttagagaatatgctgtcaggcggtgtcggttttttctcaggaatattgattccttctgccattgcctcatctattgccggctggatttcctcaatttcctctgttccaaacagtccgttttctccgcagtgtgggttaagacctgccacaccaatctttggattctcaatgcctatcgccttgcaggcatcatttgcaattcttataacttcaaggactctgtccttctttaccttgtcacatgcctgcctgagagaaacatgcgtcgatacgtgtacaaccctcaaatcctcgtgcgcaagcatcattgtgtacttgtctgtatgggtgtactctgcataaatctctgtatgtcccgaataatgatgtcctgccatatttattgcctctttatttaaggcatttgtgacagttgcgtcaatctcgccgctctgcgcaagctctattacctttacaacatactgaaaagcagcctctccacacatctttgatacttttccgaatatgtgtctgtccatgttcacaaggttcatgtcgtacacatcaatcgttccgtactcaaactttgcttctttaatatcgtgaatcgcatgaatctttatctgtccttcttttcctgcgatttttactgcctcttccatacatgcggcatcaccgataatcaccggacgacactgcttatatatttcaggtcttgataacgcttttactgaaatctcagaaccgtttcccgcaggatctcccattgtaattccgataattggctttttcataggctcctcctttattttaataccttaactcaaacttcgcacattaaaatgtgcctatgcaccttgaaaattcaataataactggcataaaaatagcatgaaaccaatggttttgatataattgagttgccaaaaacaattacaaaccggaggctcatgctatggataaaagtataacacaagcgactcaaaatgataagcaaatttctaaatctatcaaacgatttttcacaaggtttcatatttcctcagccttgaaagctgccaatgcctataaaaggaaaggcactccggtaacggagatttttcaatacatgtttctgctgattttctccaacagaagtatgtatatgagtctgcttacaggaaaaaatactcctgattttgcaaaagataccgtgtatcgtttcatgaagatggttcaaattaactggatgcgttttactacaatccttgcatccagaatcataaacaacgctattcttccactggattcggaagaccgtgccaatgttcttattattgacgattccatgtttgaacgtaaccgttctaaaaaggtagagcttcttgcaaaggtctatgaccacgcaaaacataaatatcgcttcggatttagaatgcttactcttggatggtcagatgggagtacatttttgccggtaaacagcattcttctttctacagaaaacaaaaagaatcgtatcaatgaagcggctgagatagacaaaagaaccgttggttacagacgcagaaagctgtctatggaaaagggaacccatgccatgcttgcacttctggaagctgctaaaaaagctgcaattccggcaaaatatgttctttttgacagctggttttcatctccaagcacctttcatgctgtcaaaagaatggatttagatgtaatcggaatggtgaaaaaatctccaaaaatgttttttcgctacgatggtgaagatatgtctttaatctccatttacaacaaaaataaaaagagacgaggcaaatcaaaatatctgctttctgttatggttgatgtagtgaaggatggggacatcattcctgccaaagtagtttatgttcgcaatcgcaacaaacgcaaggaatatctctgtctcatttccacagatgtaaatctggatgaaaatgaaatcatccggatttatggaaaacgctgggatatagaggtatttttcaaggtatgcaaaagctaccttaacttgagcagagaatgtaattctctgtcctatgatgcaatgactgcgcataccgcagttgttttcacccgatatatgatgctgtcactggaaagccgggaatccaatgataaccggtcacttggggagctctttttatacttttctgacgaaatgtctgatatcacatggatacaggcttttcaaatgctgctccaaatgttcagaacaatgctttcagataacactgaactttcagacgaaaaaatcgatgaattggcgaatgtatttatggatgcacttcctgcattgttgaaaacaaaactccaagctgcttaaggtctgaacattgacaactgaataactgccaggtattgaattttcaaggtgcatagctaaaatctacgtgcgaagtttgagaccttaagatatatgtttctgatatcgtcaaggcttaattctttcatattgtttacaagaagtctctgctgtttgcttccggcatcaacaaggaaatccaggtcctccggcttaacaccgaattcctttaaatctgttggaatgtttgtaacctttacaatgtcagcaatctgatcgatcatgtactgtgctttctcatcctcagattttcctgcaagctcagggtaaacagcatcgcaaagtattgcaagtctcttgctgcatgcgtccttgttaaattccataacatgtgcaaaaagtatggcatttgatacaccgtgagcaatgtgatatttgcctcccagtggatatgaaagcgcatgaactgctgttgttccgcttcctgtaattgcgactccgccatagaaggctccggtcatcatattgctttttgcttccatattgtccggattgttataagcttccctgatattgtggaaaataagcttggctccggctgctgcataggtatcggaaaacggtgttgctttctttgaggtgaagcactcaaccacatgggccaatgcatctacacctgttgctgccacaattgattttggaagctttctgatcatattcgaatccaataccacatagtccggaatcatactgtcatttacaattcctttctttgactgttcctccggaaccgcaacgattgcattgcaggttgcctcagatcctgttccgcatgttgtcggaatcataaccgtcttaatctgtttctttgcaagcatcggatcattgagcaaatcttttatagtatagtctgcatcttttaatacgcagcaaagctttgctgcatccataacgcttcccccaccgattgctatgataagatcacctgatgtgttctccacttccttcataaccttttcaacatcctgatatgatggttcacaagcaagatcatcaaatacctgatactctgtcttgttttcctcaagaatgtctgtcagcagatctaaaagtcctgttgagcgaatgcctttatcagtaaaaattattactttttttgcattctctttttctattaccgctttcacattctcaatgcttcctgctccgccaaagatacatgacggaattttaatctgataactcatatattacctctcctttgttatattgttattcttgtgttttatttttgaacatctctttgaactaatcatataatatctgttttttgagccacgttcaacgcgttgttttgttatttttgttctatttcgaaacataagccgcatttatttgttgcattttgaaacattctgtaatacaatatggttgaatagtaacaaagcatcactatcgctatctttacgtttcatttttaaacattaaaataaccacttaacatttacaaatcccataaggagaaatatatgcagaaaaccaagattcttgcagtcgccccttacgagggcatggctgacatacttaccgatatagcacagtcgcgcgatgacattgctcttacggtccagaccggcgatctgttcaccggccgtgatatagcaatgcagcttgcacataaaaattacgatgttatcatttcgcgaggtggcactgcagagcttatacaatctgctgttgagcttcccgtcatagatatatccatctctgtttacgatatacttctgagcatcaagcttgccgagagctacaacggaaaatttgtaattgccggttttcccggaatcactgcaaatgcacatctgctgtgcgacctgcttcaatatgatattgacataatcactttcaaggactcggcagatgcagtcaatcaccttaaaaaagcaaaagaaaacggctgcacacttgtcctatgtgacgtgaccggtgccagagccgcaaaggatatcggattaaattataatcttgtaacctctggcagggaaagcatagaaaacgccgttgccgaggctgtaaagcttgtgcactcttccaattatgtccacaagcagaaggatctgttccagtcgcttctgaccgaggatgaccgcgaattcttaatttactcgcctgcaggtactctgtggttttcaagcatcgcaatagatgaaatgaatacatcgttgatgaattttgtacagacatacattaagtcatttttgaaagttccgaaccagaccgtttcgcatcagatacgcgataacgtctatactctgtacaaccgccacctgatttacgaggaccagaagtacactgcaattactatatgtaagagtcctgcattaaccgccgaggacgaccctggatttcagatttacaatattgacaacacctcctccaacgactttgctgacgcttacaacggaaccggtaaagcaggcaaaatagcgcagatagtagaagaatacgctaaaagccatctgcctgtgcttattctcggagaaaacggaaccggcaaaggcaaggctgcatcacttatttacaagcaaagcaactataagcacgctccattttacagtatcgactgttctctgataaaagagcgtaagtggcacagcctgctaaacaatgagaattctcctctcaacgaagtggacagcacagtattttttgaaaaagccgatgctcttagtctggaacagattggtgatttgtttcaatatatagaccagacgaagctttgcacgagaatgagactcatagtctcgctttccaccaacaactccaatcagcctgcatttgccacaatacgcaccttcatggagaaccatctttcctgccttaccctgaatctcccaccgcttcgagagcgcattgacgatttttccggtataaccgcgctctatctgcaccggttcaatgtctccctcgggaaacagataataggctttgatgttgaagcaatggaaaaaatgctctcgtacaactggcctaacaatctcgaccagctgcagcatgtccttaaagagcttgtcacaataacaaagacaccgtatatctcctgtgacactgtagaagccatcctgaaacaggagcccgactacggacgcgtctttgatgattcagtaaaatttgatggaactctagatgagataaattatcagatcattcttcaggtgttacacgaagaacatgacaataaagaaaaaaccgccaggcggctcggcataagccgaagcacactctggcggatcttgaagaacaataattaatgcttaatcaatttctccctgtgggataaaaacctgaacatcagcattctcgtcaagctctataaatactcttgtatctttgccgaccagtcccttaaaatgtccggtgaatttctctccggactgggttgttccggtaacatccattttgtatacgcttccggcatctgatgagaaatcaattgaatcatggctgccaagtgtgttgacagtctgctctttgccatcgttccaggttaccttgatattcttaacattaaaataagtctggtttataagccgaatagttgttgtctcttttccgtcctgcgctgcataaatacaattagtacctattaacactcctgccatgatagtaactaatgcaaacgtagcaagaacttgtttgtttattattttattcatttctgaatacctccttataatggcactccattatcttcgcggatattttatcacaagatatattaattaaacaattgtcaattagctcaaaacttttttattattttatgtttttattgacactttttcaaagcatttgacattatttttgggtttgttttgtacctaaattttatatgagcatgtggtggtggaatttaaaatttcatttttggtttatatgagcgtatttagataaaaatggacgaagcatggtataaatgatataattaaaatgaatgatggaataataagaaatgggagaaactgttatgggattgttatatgcaatattttcaatttttatcacgctatttttcccaaagcaaattacggatgtgatttgttatggaagacatcgtgatagagaaaatataaagagtaaaaaaatatattgtcttatatatgttttttggacattatttttgggtttgttttgtcttatgatgggttcggcatcaggtgtaaataatacatttgatagagttttggattattatggattgaattttggcgaatatgattattttgaggcggcgtccatatatgacgaacatgattataaacatgaaggtgatttcactcttgtatactttatcagaaaaaatgaagataatttagatgatttaattaaacaaattgttcaagaaaataattctatatacaaaagatatcagctcagtgaaattgacgtgttatatgaaacgaatggtatttattatatatgtgaaaagggggaggtgattgcaaaggtagtagtagaaaacgatggattgttaaaaaaagtaagttatcaatggagtagagaaaaattagaacaaaatctaggagggtaacagtattgttatgaaaatccgcggtatattactcctgcaaaaacaccacattaaataataggctcactaattatatcctggcaagcctattattttctttcatccctatctgtcaatagttagctgattctcaaatgtttgctaactgattcataaaacttaaacaattgaatgtctttacagtctattccttcatccaagtcttctgaatataacaaaatggtgcttttagaagtgtttttcatgtctatatgtaaacacaatacatttataaaaaaataatcgaaataatgaatttcacattttattacatcttgatattcatatttattcccattaatatagaagaaatcttcatatatctcatactcaaattcctttatgaataatttccttgttgctttttgataaatatatgctattcctacaatcataaatgcattcataaaaataaatggaaatccatttatattcaagcacaacctattaattgaatattcctcagcaaatactgccacaattaacaccaagaaaaatatagaaaatctaccaaataagtgctgtatttttatcgtttccatataatatctcctcgtatttgcatagtaaccaatgttccaaatccattttccttttctactatatacttcttatcaatttttcgttcaaagcaggcaaattcctttttactgaaaaataacatagtcaatgtaatttcttcatcttttgatttcgatattgtgatccatgtcttatgataacaatcaagacctagaattttctgaaggttttcttttagtctggcactattttttatttgatttacttccttgttaagcactaatacaaatcctatatttccaaataaactgtagatatccatattttttctatcagaaaaccatattattggtgtaaaaatagccaacgacatacatgctgctaaatttaaggatataaaatcatcacttacatttatatccagtgctaatattactaataaacacgcccatgaaagtatattcacagctgccaatatcttccacaaaatattaattcttttcgtctttactaaatagtatcccgcaataaaaataagagctatgaacattccttcaacaatctctttattcaaattcattactcccttcatgtactttaaaattaataaagtaggtcacacacgaacatatgctcacacaattatatgtgaccgaactttcagatgaaaaatcaacgaattggtggacacatttatgaatatacttccggtcattttgaaaacaaagctgcataaagtttaaacattgacggatacaacattctaatcactatttcaataataattaatatcgctcccaacaaaattctcccctttttttacaatatgtctattttactcaaatttgtttcttcactgatttttctataacaccattcactttgaatgattccaattaacattccatagcacttacctcttgtatagtatggatatctacttaattacatcctctttttgtttttcctataattgtgaacatttattaaaatagtcactattgtaatcaaatttatagacaccagaaaaagcatatgttccgatacatttatctgcttaactatcaaaacaaccatttccataaccatcaccataaaccataaaaccacttgtgttattaataatataaatctagcttttttatcttctacgcgcttatcttgctccattattatcccttcgtatgctatatattaaaagcttattttctaattttttctgtttaataaagcctcatttttagaagcaaatcttataaaaaaactgtttggcaactctgtatttttaaaaatcacaatataaaatattataagaatcaattttgttacgtttgatacattttctacattaaccaacaaaatatcatcccacttataaccaagaacactgcctatagaactcgccaatacattaaatgcaataaaaataagtaaaaattgtctactccatatattttttgaccaaaaagattttatatatttacgtaatagtatcagcacaatagcagaaaatactataagaacaatgcaaactaatggtttcttataaagttcaaatatatactgcaagctaaacatgtttattaaaattcccatgccacgtccgccaaatattcccgattcattcaattcacattcaattttcttaatttctgatatcatagaaatataatacactgcataaaacatcaaacatccgattaataatacgctaatattctgaaactcatctccggtcgttgtcttgtctaatatatagtaactaattatacctagtccccatataataaaatgtacgatatattttttcactcttcacccctgcatttttagaatgatcataataaatattacagctatgatctgacatactattcctataatattaaatttcctgctattatgagcttccaatatgtctttttttaaacttttcaaattacaaaaaacagatattaactgaaaagtcagaaatcctatatataatactttatacatttttatcccgcctcttctctttgttttatttttgccattcccgtctgcagacagtcccgactctatgtaaagcttttacattctcatctgcagaatgcagctcatattttaataaattatttaatttaaacgttttattttcatatattcttatactactcatttctatccttttctacttttgtatctcaagattaagcataaaattaacactattccaaataatgtacacataatatcaacaatataattctcataaggcattaaaaataatattgcctcccctaagtacattaacgaaatcaccaatgtataccctttttctttatttttatgagaaaagtaatttttaaattcaattaagaatatacaaaataaaataaatataatgtatttttcattaaaaagtttatgctcacctaaatattgaatcatcttatcctccaaaatgtgtagttctccatattcacacctacaaaaaaataaactagaagcagagcaggaaagcttctagtttatcccatcttccgcctatatgctaactattttctgcgaacggttcattttttcgacgaacggttattttacaagcagactttattggagacagatagtaatttagaattgtgtttattatttcatttcctacatcgtagtctgtatggtcatcgcatattgcaattcctatcatttacacttgcccctatatttctataacatctttagtataacttttggtgtttttaatttacaatatttgtttctttccccaataaaaaacaactgtggcataaatccacattatgggttatactactgttacattacactaaaacagaagaaatgaggacaaacatggacattctatcaggcaatcctatcagggaaagcctggtatgcttcacatgaaaacttcacagctcatacttgatgctgctgagattatcatggctgaggcagaggtatagaccacagcacaaaagtggaataactacaacatacaactaaatgtggcaaattgccaacaacttgttgacgatttgccgtctcttattttcttaccactttataacactgtgatacgatattttgcgatactttacgaagcttcttccgagcaggtctttgtattctcttttttcagcaaagccgctatttcaaacctgcggctatttcgccagataatccccagtacttagtggcaagccgccactaaccgggcaatggttgcacccttgtagcccacatataaaccaataatcataaaaagtctcatactacatctttacttcaatcacttttatacatatcatgaatccttaaatatttcatgctgcatccccgtaataactgatgcaaaacaattctactcgtgtacgccagtacatacgtatgtatatcattgttagtctgttgttaactcatcgtcaattcataaatcaatttttacactcaaagcagaacattcttctctaaaactatttttcaacaagacaactactaatcagttcttccaacatatcgttgctggcatttgccgatctgacactggcggctatcatctcttcttttgaaacatcggtaaaatcaatttcaaatctaccattgttcaagcataactgctcaatgtatattctctgagtccttccattaccttctctaaacggatggatcatattaatctcacccaggtaataggctagtctctcgctcatttcttccttatcggttatgtcaactaagaaattttcctttttcagcttacgatacaaatcatcaaactggctttcgataaactgcaccaaacaaaaaacggttcctttggaaatatcaaccgttctcgtcttgcccgcccaagaatatacatcactgaataaatgcttatgtatagaacaaagatgcttaaaagagaaatctccagtaacgccttgacctacaagttctgcctgacgcaccgctgaataatctctttcagcctcatgcaatgtatctaaatctcttatatccagtttattctttaatacatttattcccggataacagtacttggcatcctgttcatcctcatagaaataatcatactcttgatccttcaacctgcttcttggatactctgtatttcttatttaattctgaaattgcatctgtagcagaaactttcttggttaagacatttcttactctttgacgacattctgcatcaaatggcatgctttccattttgaagctggattcaatactgcttactcttctatcaactgtcatacacgtatcctttcccctttccctttcgcagaaaggtatttgttcttctatagtataccacaaaacgctacatctatactacaaatttccgtattacgaaaagcgaacacataaccttctccggtgtcattgtcattccaatttacccccattacatttcaggtgcttgccactcagacttaccatttttcttacaactttataccactgtgatacgatattttgcgatactttacaaggtttgcaagctaatcactaaagaccttccagccctcgtaaatcaagcatttccgccactttctgtcatctacttctcatcaacgacctggaaaatgaaaaacttaagataatacgactccggtacattagctgagttggcccacagtatcggatgatccggtccctgtgtgcggaactccacctggcgcagcctcttgtgagtggcctttgccgcttccttgaccgtttttgcaagcagctcctgcgtcatgaaatgagagcatgagcaggtagccagaaatccaccatccttaacaagcttaagtcccttcatgttaatctcgcggtagccctttatcgcatttttggtagcctcgcgcgattttgtaaatgccggaggatccagaatgactacatcatatttttcaccatctgcagcgagccgtggcagctcatccagcacatttgccacgcgaaacttcactgtgtctgagagattatttctcttcgcattttctgtagcctgcttaaccgcatactctgatatatcaagtcctgtgacctcacttgcccccgcaattcctgcattgagggcaaatgtacccatgtgcgtgaagcagtcgagcactcttttccccttgcagatgcgctgcatagcaagcctgttatacttctggtctaagaagaagcctgttttctgtccattttccacatcgaccatatagtgaactgcgttttctactatctccacatttgtgtcaaactcggctcctataaaaccttttaccttaggaagaccttcttttctgcgctcatttgcatcactgcgctcatatactccacgaatatttattccgtccgccgccagcacttcctttaacagttcaacgattttcaccttaaactgctccattccaagtgcaagacactccaccacaagcacatcagcgtacttgtccactgtgatacccggcaggaaatcagcctcgccaaatatcacacgacagcagtttaaatcagacacattatcattgcctcctgccatcacctgcttgcgataatcccaggcattttgcactctcatcctgaggaaattgtcatcaatcagctggtctgcttttcttgtcatcattctgatacggatttttgaattctggtttatgaagccgcgccccatcggatatccgtcaaaatcgtgtaccacaacaatatctccgtttgtaaaggtgcctgtgattgtgtctatttcattgtcaaaaatccatgcgccacctgcctttatagtgcgtccttcgccttttttcagtgttacaattgtatgattttccatgtttgttcctcttctaatttacttcattattccttgctaaaatctgattatatagtttatctgaaattctatagcctttagaaataagtttatccatttcaggctttactaaatttattaacccttttgtttttgccaagctcaaaattcctaaaacgcctattgtatcaattaaaaattccgatgccatttttcttgcagcatgctcatcgattattgcaaaatcaattccaagctcttttgcaccaacaataacttcaagctctccaaaatgcaatcttccatataatgcctttactgtatccgcattttttactttgtatatgataatttttcctgaattaacacactctttaatccttttaatttcatcctgatgatttacagaatctgcacataattcattgaagacagcttccggaattataatgcttccaaataaatcccataataaatataatctatctatcgaaatcaaacctataataggactggtattgcatataatgtcaatttttttcatccattatttcccccaatttactcaaaaaaacatcatccatatccatgtcatcctcctcatattctccccatggtataccatataccttaagaatatctataaaatcccatatacttttgcctgtcaactccgcagctttttctaaagtaataactttagtagtaaacaaacctaccaccgctgataatgtaagcttatcacttaccgtttcgccaccttttagtatatataaataaggtactaaatcttctgatatttttatatctatattctttgaactcatagtctttccctccaaattctaatataattccaacattccattttaattatatgaaatcccggcaatatttacaatacacaaatatttctgcaaaacatgccgatatatatattataatataatcgtaactattataacatccgaccggtaaatggagataaatatgattacaattagcttatgcatgatagtaaaaaatgaagaagaggtgctcgaacgatgcctgaacagtctcaaagggctgatggatgaaatcatcatagtggacaccggctcgactgacagcacaaaggagatagctgcacggtatacggacaaaatctatgatttctcatggtgcgatgattttgctgcggccagaaatttttcgttttccaaggctacgcaggaatacatatatgcacctgatgccgacgaggtgctcgatgataccaaccgcaggcgtttcatgatgcttaaggctgcgctgctgccggaaattgagattgtccaaatgaaatacattactccaagcaaattcaacacagtgcaaaattcatcctcagagtatcgtccgaagctgttcaagaggcttcgcacgtttacatggattaacccggtgcacgagactgtgcgcttagagcctgtagtctatgacagcgatatctgtatacaacatctgccgcagggcactcacggcaaacgtgattttaccatattcaagcgctcctttgaaagaaacggcaccctgccaaaaagtatagcgactatgtatgccaaggagcttttaaaatgcggaagccccgaggattttaccaatgccctgccatattttcagggtgaataccgcaacagccccgacatcgaatccacctgcgtgctatcacgctactatcgcatgaatggcgactacgacaaatttttttctgttgccctaaaaaatgtagcagttgatggctacagcgaggtgtgctgtgagctcggtgcgtactatttcgacaaggcagactatgaggaggcaagcctgtggtattacaacgctgcattcgagacaaagccggtactcgatgtggagtgcggcggtggcaaggcgcttcatgccctgtctgagtgctactcaagatgggctgatgagaagcagaaaaagcttgattcgcttcctcctaaatcaaggaatgtatttaaaggcgataaggagctgattgattcactgcgcagccaggcggccgattaccagaagcaggctgaggaatggatgcttccggagggtgattagcagatgctgtcatataaaagtctctaccagcatttaccaacttgtaaaatcctctctaaagtgataatatagagattatagggtttgttatttttttaacgtagcattttgctactatcattttaggtatctaaggaggattttatgagctttttagaagagtacaagcagaaacttgtctcagcagatgaggcagtaaagattgtcaaatcaggcgactgggttgactacggctggtgcacaggcacacctgatgccctcgacaaggcacttgccagaagaacagatgaacttaaggatgtcaatgtacgtggtggtattttgcttaagccacttgccattttcgagcgtgaggatgccggcgagcatttcacatggaactcatggcatatgggcggttatgagagaaagcttatcaagagaggctgttctttctactcaccaatccgttactcagagcttcctcgttattatagagattcaacaacacctgacgatgtcgctatgttccaggttgcaccgatggattcacacggttacttcaactttggtcctaacgcatctcacctcggtgctgtatgcgagacttcaaagaaaatcatcgttgaggtcaatgaaaacatgcctcgctgtcacggcggttcagaggccaatgtacatatttcacaggtttcttacattgttgagggtgacaaccctgcaatcggagagcttggtgccggtggtcctgcaacagatgtagacaagaaggttgcagagcttatcgttgaccagattccaaacggtgcctgtctccagctcggtatcggcggaatgccaaacgcagtaggctcactcatcgctgagtcagacctcaaggatctcggtgtacacacagagatgtacgttgacgcattcgttgacatcgcaaaggccggaaaaatcacaggagcaaagaaaaacatcgaccgttatcgtcaggcttacggcttcggtgccggaaccaagaagatgtacgattacctcgatgagaatcctgagctcatgagtgccccggtaagctacacaaatgatatcaagaatattgccgcacttgacaatttcatctcaatcaataactgtgtagaccttgacctctacggacagatcagctcagagagctcaggcacaaagcacatcagtggtgccggcggacagcttgatttcgttctcggtgcttatatgtcaaacggtggaaagagctttatctgctgctcttcaactttcaccgacaagcagggcgtagttcactcacgtatccgtcctactcttgtagagggttctgtcgttactgacacaagagccaacactcactatatagttacagagtatggtatggtaaatgtaaagggtctttctacatggcagaaggctgaggcaatcatctcagttgctcatcctgatttccgtgatgagctcatcaaagaggctgagaagatgcacatttggagaagatctaacaaataattaactttggatataatttttacaataaaagcggtttcaggatgcaatgtcctgaaaccgcttttgtgttattaatccgtcccacaaactatattttcaaaaagttaaagcacctcttttagcacttcctcaatctcgctctttgctgccttgacagagccctgcaccataaccggcttaccgccgcctctggcacccagcttatttctcagtgctgcggcaactgtattgcagtctgcattcttgcttccgataataaagctatagcctgcctcatcatttcctgtaaaaaatgcactaaaaccactatatttctccacaaggccattgacgcaatttcttgctgtattcgtatcaatgccgtcctcaaacaatactgcattgtccgtatcagcaggaagctctgctaccttataatccaaaagcgctgactttgcagtgccaagctctgacttaagtgactggtttactgccttaagctttgtgacgttatccacaatagcctcctgatttgtggtaaatatccccatgagctctgagataatgtcgcacttttgtctgaaagcctccagtgccctgaaaccacaaaggatgctgattctgacgcctcctttataattctgataattcataaccttaagcatgccaatctcgccggtgcgcttcacatgcggcgcacagcatgcacacacatcataccccggcactgtcactattctgacctgtccttcaatctcgattttgcttctgtactccagctgcgcaagctcatcccttgacggatatgtcacctctatcggaatattttttgaaatggctacatttacctcatgctccacctctgctatatcctccggtgaaatcactccgctgaaatccattgtcactacagaatcactcagatgaaagcccacattctcaaaaccaaacctgcggtggacaattcccgaaaaaatatgctctccactgtgctgctgcatattgtaaaaacgatgctgccagtctattttgccatgtacgtggacgcctgctgcaagctctactttctcagaagcgcactccatacctgtaatctgtccatcagtcttcttttctgtctgagcctcttctttgcccattatgcagcaatcacctgcggaaatatccaccgtatgagtaatgactccattcttaatctgcacatcaacgaccctgtagccaccaagtattcccatgtccgggctctgtccgccctcttccgggaaaaataaagtctgatttaatattatatcaaactgcttatcatctgccttgttcggctcgcaggatataatatctgcctcaaactccgtggcatatgcatccctgtcgtatagtttaattgtttctgtcatactcatactgcttgttcctctcgctctatattcttatgcatcattgctatgtcctattatagcgcattcataattcatatgaaacccctaaatctggtttcccacaatcctgtagtatgctctcgaagtaatcttgaaaacaatatagtatatgaccataaacacaaaaagcgtagcaaccatacagatcacaataagcttaacatccgtcagattaaacatgacaagcagtctgcgaagcagaggaaatgctgctgcaagatgacacgctgcaaggataatcggcaggaaaaacaccatacgcacctgcgaagtaatggatttcttcacctcgtcattgctcatgcctaccttctccataatctcatagcgtgctttgtcatcatagccctctgaaatctgcttatagaaaataatcatcacagtaaccataagaaacatcgttccaaggaatattccgataaagaacagtccaccatacaatacataaatctgttctctgtttgcatcacggctttcctcatagaagcctgacacatctgattttacactattttcctcaaaatgcttatccagagcctttgccacagcaagcttatcctctctgctgccatacagattataatcaatttcattgttgagcatagtcggcacactatcccctcccagcgagctgttcaggttaaatatctctgcaagtgttgccttgctgtctaccactacatagtacacaccactatacatagaggacatatagctgtctttacttacagcaattttttctgccgcagccactttaaattctttgcccaacagattaattatatcgccattaaacttttctgttccataaacagccaccgaaccggtatcaagctgtgggatttttttattcagactctctttaaagccggtctccatctcatcaatttcatctcctgtgacaaaatacaacagggaaatatcgttatcgtaacttaacaccggcttaaactctgtcccctctctaaacactgtccagctaaaataagtgtagcttttgctgtctttaacattacaagcagagtcagctattattttatccgaatctgcagcagcttctttaagtgcatcatccagattcacatcatccggcacttccttataccagctatatacgctgatatccgaaggatatctctgcttaagttctccctccatgcccgcatacatactcacggttgtggaaacaacaaccagcaccattgtggaaagcacgcatatactcgctagtccgccagcattctgcttcattctgtaaatcattcctgaaaccgccgcaaaatgctttttattatagtaaaacttcttgtttttcctgagtgccttaagtatcacaatgcttcctgaaataaataaaagatacgttccgacgatgacaagaagcactgcgacaaagaacagtgaaagcacctgaagagggctctttgtggtaatcgcaatataatatcccccggcaagacagcctagtccgattaaagcgataagccatttgctcttcggctctttctcaccgacattgccaccgcgaagcagctctatcggattagcaagcttcacctgcatcaggttatagatgagagtaagaaaatacagcactccaaaaataagtattgtatttacgacagcgccagtagatacagcgaaatcaatttgtgctttaatatttataatcctataaagaaacataatcatcagcttggaaaataaaataccggctatgattccggatactattgctgcgagtgctacggtaagtgtctcaattatcaaaactctcgcgatatgacgcttttccatgccaagaatattgtatattcctacctctttcttgcgccttttgatgataaagctgtttgtataaaacagaaatatatatgaaaaaaccgctattgttccgcatccaagccccattatcgacgccagtgcatccgcgcccggcaccttgccaagtccctttgagttgtttaaaaacatcatcacataaaacatggctatcatgaccattcccgatataatgtaaggcatataaagagtcttattattttttatatttgtaaatgccagcctgctatatattttattcatgcttctcaccacctgtcgtaatcagcataagtgcatcctgaatcttcacatagagctcgtcatttgtaagattgccacggtaaatctgatgaaacacctgaccgtcctttatgaaaagcaccctgttggcatgacttgcagcctttgtgctgtgtgtcaccatgagaatggtctgtccgtcctcgtttatcctgttgaacagcctaagcagactgtctgttgcctttgaatccagtgctcctgttggctcatcagccaaaattaattcgggatttgttattatcgcacgtgccactgctgccctttgcttctgtcctcctgacacctcgtatggatatttattaagcagcttttcaattccaagcagcgaagctataggtgcaagccttttttccatatccctatagtccacacctgacagcacaagcggtaaaaagatattgtccttcagtgaaaaattgtcaagcagattaaaatcctgaaatacgaagcccagatgctcacgtctgaaggcagatatctccttttccttcaatgagacaaggttctttccatttaagagtacctctcccgctgtcggcttatcaagtgccgcgagaatatttaaaagtgtcgtctttcctgagccggactctcccatgattgccacatactcaccttcctctacagagaaattgatgtttttcaatgcctgtacctggttgccaccaaatctggtggtatatatttttttgaggttacttacttctaagattgccatttcaatgctcctttacgatgatttcaaaatgttatttaaacttctatttttgttacatttattttaaatatgacgtcataatcggcttcacaacttacattgttgatgcttcatgtaattataataacaaaatgccggaatgtatgctatcgaatcagcttacatttcgacctcgtatcttacatttttgtaagaaatgacaaagaaacttaatctggagtagcaaaaagaggattagcacagatgtgctgatcctctttttatctacagatttttaattacctcaactcttgtgacaacgccctgcttcacattatcaactctgagcgcacaatcctggtaatacacacaggctccgattgacacatttttaccctcatcctgcaatttttcgcttatcacatctctaagcagctttgtcttttcctccggtatatttgttccggaaataaaattcgccctcgctaccgtctggctgccacggcatatcatgtggtctgcctcatcaaagctgcagaaaaggaattttctgatggcaaaaagcgccgctatcgcacctattccgacaagtgtctcatatacattgagatgctccacgatcatctgcctggctgttgcaaacaaaagcacctctatgattgtacccggcttatgagtacagagcattttcacaaactccacgccgattgcaagcgacatgatatattccatgtaatactccagtttaattttatcatgccatatatcaaaaaagcactgccctataagctttataataagcaccactatcacaaacaccaatactgccgacagaaaaagttccacgtaggctgctacatttttcattgtttttctcaggaattgcttcattatcatttattcctctcttttttagttaccggcaataatcttttttattgcagtaatttattttaatatcctatggaaatgattatcatactattctaatttcatatatctaaaagctcccacataatagtcaaattatgtgagagcctttgcgcgaaaattatatttttttatgttttctcccgcattctgcggatgtatattttgccagaatactttcatggcaattgggttctaaataaatttgataccaggctccggcaactatttgatgaatcctacctgcttgcagatttcctctgttgctgcatcttttttcttgttgaactcaactttctgctgctcgaaccagttgttaccctctgcatctatagatacgataagtgggccaaactctttcacacggcagttccagagtgtctcaggcattccgagatctctccactctgcgcggacgatttcctcaacctctgttgcggctactactgcatttcctgccgggaatacgcagtgaatggcaccgaactctttacatgcacgctctgtattctctttcataccaccttttccgatgataacacgtacgccggtctcttttacgaactcgtactcgaatttctccatacgcatacttgttgtcggtccaacagataccatctcaaatttgtcattctcgagtggacggatgatcggtcctgcatggaaaatagcattgtttcttacgtctaccggaagctctcttccctcctcaacgagacgtcggtgtgctacgtcacggcatgttgtcatgcttccatttaagtatacaatatctcctatttttattcctttaagatcctctgctgagattggtgttgttaaaattgtttttccattaattctctctaccattataattccacccccgaatgtgttgtgattgtatagttaaggtccttatcaaaaacaatgtgtccgcgtctgtggctccagcagcctacgtttacggctacaccgattgtagatggatgacgggctgtgttctcgatatttacacccattactgagtattttccgcccattccctgaggtccaaggccgatagcattgataccatcctcgagaagtgtttccatctttgcggctctctcgttctcattgtgagatccgattggacgcatgagtgctttctttgataaaagtgctgctgtctcaacagatgttgctacacctacacctaccaggagaggtgggcatgcatttaaaccataagtagtcataacatccattacgaattttgtaactccttcatagccctctccaggcataagtaccatagcttttcccggaagtgtacatccacctcctgccatgtatgtgtagatctcacatttgtcactgtttggcacgatatcccagaatactgtaggtgttccttttccaacgttcttgcctgtgttgtactcatcgaaagtctcaacactgttgtgacgaagaggagcctcaaatgtagcttttacaactgcctcttttaaaagtccctcaagctcatcaataagtgggaattttgttccacatttaacccagaactgaagtactcctgtatcctggcagcttgggcggttaagttttaccgcaagctcctgatttctaaacattgtatcatagattgtttttgaaagaggactgtcctctttgtcacggagttctgtcagttttgcaatgacatcatccggtaatttttttgctatatgagcgataaaatttgccatataggtggtaagctgttctacctgtttctcgtttgacatagtttttcctcctaatataaatcttataaataattaaatattaatttattgtttacccactcccatccgttcttatgggaagaacggatagaaaatcggcagtaagaccatacttacaatggtcgccactactataagcggaataccagcctttgcataatccttgaaggtgtatcctccggctgtaatgaccattgtgttggcaggcataccgataggtgtggcgtatgcacatgaaccaccgataacacatgccataagtactgcactcgggtcagctccaatctctgtggcaattgatacgcagattggaaccaaaagtgctgttgtggcggtatttgacataaagttcgtaagtacacagcaaagcatgaacactacgaatgtgagaacatatggtgatggatttttgccaagtataccgataaccgctgttgcgatttcttcgcctgccccggtctcctgaagcgccgctgcaagtgaaagagttccaccaaataagaaaatggttttcaaatctattgatttaagtgcgtttttctcactaataacgcctgtaatgataagggcaagtgctccgacacagccgatgacacaaagcttgatgccaatcttgtcctcgaaaatcattcccaaaagtgtaaggattaagataatcaatgacatcatctgtttccatttaggcacatttgaaaaatccttctgctcatcatatgagctttccgtactgccctgcttttcaggcaggaatttgtatcctataaatgcaaagtacagaatacctgctataagtatcggaagtcctacctttgcatactcgaaaaatccaaagctaagtccaatctctcccatagctgattgtgctatgagatttcccggtgcaccgatgagagataaatttccacccatggctgctgcaaaaacaagtggcataagaagtctcgatctcgagtatcctgattttgctgcaattccgataactaccggaatgagaactgctgcagttcctgtgtttgaaagtactccgctcatcagtcccacaatcaccatgattgctatgataagctgcctctctgttttggcgaagtgtgtgaccactcctccaattttgtttgccataccggtttcaaacaatgctcctccgacgataaacatcgctacgaaaagaattacattgctgtcagtaaatcctgaaaaagctgttttccaatccagtactcctgtgataacaagaccgacacatactatcatggatgtaaccccaagcggaatcttttcccacacgaacatcacaacggcaaacaataagaataaaagtgttattgttgctggactcatatcattttcctcctccatttaatatttgatatttgatattgtatccaatttctgagtttaagatataacaaaaaaccgaaatcgtcaatacctttttgacaatttcggcaatttatatatattccacctattcaatttgtgcatctattacaagtaatgtgttaaattagtaacttacatctacacataatatgtcagcatatcatcacgactacgcatgatatgctcgtacatcctccgctgtgcaagctgcacatcatgagccttgattgcttcgtatatagcctcatgctcctttatagaaatgcccgcatattcctcctctgtgaccatgttgcccattgaaagtccgttccacagttctgcgatcatattttccatctttttgttgccggatgctgcccagatttcactatgaaactcacggtttaaatccgcatatctgctataatctccggaagctgtcatctcccttgcatccaggtatgactgctctatcttgctgatatcgatatcaggtgaagcagcaaaacctgcacatgcgccctcgagtatgcctctaatctgatagtgctcccttatgtacgtctctgtaattccaagtactattgctcccttattcggtcttagcttgataagtccgtcatgcgctaatatctgaaaagcctcacgcacgggagttatagatacattaagctgctgcgctacactttccagtgtaagattttctccctcttttagctgttttgacaaaattgccttgcgcagctccgatgctacacgctccttcgctgacggaatctttatcggtttaagtcctatcataattactttttcctcttgttatcttttaattttatatgcttccgaatcatctgtcattattcagtataaaataagtcaccaattacctgctgctttcttccctctctgctataacagcctcacaaagacttccaaaatattctcccaaaagttctctgacaatatttatgtcattatccgaatatgcctctgctattttcgataacagctcaagtcttcgcgcattttccctgcctgctgccgtctcttcaaccgcaaacctgatatagcaccaaagaccattttcaagaatatgtgtaaaatactcgttatgactattggatataattgtctcatgaaactgcagctctgcagacaatttttcatttataacagatggctcatgtacgcaattgggctgctcactgttatcactgaccactttatcccacaaacatataccagacttcagcatgccctttaacagttttatctccacctctgaaagcagctcatagatttccgttatcacctcgtccgaaaaatcagccaccaccacatgccttgttgccagtctctttgccaatccctgcgactcaagtatctgcaatgcctccctgattggtattctcgaataaccgagactatccgcaagctcttcctgtcgcaatggcactcctgatgacatacgtcctgataaaatttcattctgaatagcttccgctatataatcacatactcttttatttctcataatatattattatatctgattttggatacaatttccagtcaaacttattacaccgatttatcctaatctctcgtatccgcataatccagatcaaacccaatccacaccttagttccttttccaagctctgactctatgtggattgtatgccccagcttgtctgccatctgcctgcacagataaagcccaattcccgtagccttcttatcggcatgaccattgtagcctgtgtagcccttttcaaaaacacgtggcagatcttcggctttgattcctattccggtatcctttattgtaataaaaaaccggtctttttcctctgcagtttctattgtaacaaccccctgcggtgtatattttatggcatttgaaagtatctgttccagcataaatgcaagccattttccgtcagtatatacctcctgcccggttccagaataatttatcccaatatgccttcgtatcataatttttgcatattttttaatggtatcacgtatgacaccatccacactgactttttcaagcacaaaatcattttcggtgctgctcacacgctgatactgcaaagccatactgacatattcctctatgcggaacaattcgtcctcaaatgaagccacattatctgacagctctgtgagtacagcctgttgtttcaaagcagcatttaatccggcagcaccgatgttcccaccggtcatatcgcctatatggcactgactctgttcatcatcacatataagctgcccaagctcctcccgctctgcctcaagcagtagtttcatagccgatatcggggtctttatctggtgcacccacatagagtaataatctctcatctgtgattgtctgattgcagcactgctttctgactcacttcttgcaatactttgattttccagcagtccatgataaagtatctccacatcatctgttgcttccggaagctgtgcctgttcctcaaccggacgctttaaagcatcgcttagagcttttaccttgctgctatatctgaaaaatccaaccaaaactgttatcagaagaagtattgcatcaagcactgccgcatacaccagatcctgtttgcgcgcaccaatcaggtacatgtaaagcaaatggatacaggacattgtgactatcatcagaatccatatatagttttgttttataaaatttgtcagatgcggtttgttttgtatttttgccatgacctctcaccccagcctgtacccaagccccttttttgtgacaataaagctctcaagccctatagaatccagctttttacgcagcctgttgacattcaccgaaagtgtattctcgtccacatacgcatcactctcccacagcttttccattagaaggctgcgtgatacaatcctttctttgttgtcaaaaagtgtctgcaatatttttagctcattctttgtaagctcgagccttttgtcatcataggttatggtggcatcagatatattgagcatggcgccattatgctccaaaacactgttgtttgcgccaaaatcatagcagcgcctgatgatagcctgtatctttacggtcagcacatcgaggtcaaacggctttgctataaagtcatcagcccccatactgactgccatcactatattcatattatcagctgcggatgacaggaaaaccacaggaacctttgatacccttctgatttccgtacaccagtgatacccattgtaaaacggcagacctatatccataagcacaagatgcggatcaaatgatgcaaattctgacattacagcatcaaatttctgcaccacatgcacatcataatcccatttttccaaatgtcttctgacaagctttgctatggtctcgtcatcctcaaccaaaaatattctatacattattttccgctttcttccatgataatctcagccgcatctatgatgagctgtgatgccttcatacgaagtaaatccggcttgagctgtgcctttggaatcacctgctttacaacgtcaacaggctgaccatacttctgtgaaataagctcatactgctcatccatctcctcgtcagatacagtgatattttccactctgatgatttcatcgagaacagcctcaagctttacctgcttctgtgcaaccggcttgagttcatcctttaagctatccatagtcttgcctgtcatctgaagatactgctccatagccacaccctgctgtgcaaatgatgctgccatctgctgaagctgcatatttaccgctgtctctactgcctgtggcgaaacaaggcatgagctgctttcaagaatctggtcatagagcttttctcttgccgcatcagcctttcttgcctctacctggtactcaagatactcgttgatatatttctttaaatcctccactgactgtacctcagggaaattgagagatgctgcaaactcatcgttcagctctgcttccttctcattgtaaatctcgtgcagcttaaccttgaaaacaaccgctttgcctgcaagctccggtgcatgatactgctcagggaatgagagattgatgtctctgtcctcaccgatttccatgcctacaagctgctcctcaaagcccggaataaaagagcctgaaccgattcccagaggatatttctcagcctttccgccctcaaacgcaactccgtccttaaagccctcgtagtctattactgccgtgtcgcccatcgctaacgggcctgttttctgctctctgacaggatttcctgaaagaagtgtcgctatctgtgaattaacatcctcctctgtatatgcaatataagggatgtttgcctttaatcctttgtaatttcctaatacgatgtccatgattatacctttcttttatgtgtatttatatctgcttaacgaagctgttatatgcaaatagtatacactagttaccaaataaagccaataaaaactcattgcatgctttaaaaaggattgtaaggctgtgatacgtgaaaatggttctaatcttacgcaatcaggctattaatagccttcaattcatacaatgtaaatggatcaatatctatacaatcactttcatccatttttccggaaatatcccatgcaagcgttccattcattaccgtacatgtatttttaaaattttcaatatctctcaaaggctcaaaaattgaagatttaagatcctgtgttgtatcataatcaactattttaccatcatcaaagaaaacctgtacatgataattatctaaaggtattacctgtacaactgtaggaaaatattcattcatatatttcacctctcattatataagtggattaattttgttcaatggtttcatgtccttggccaattcccaattctgcattaattcatcctgatgaatcgtacaccaggccaatatcaatcgtaattgtttattcggcaaagagcctcttattacttgtatattattaatatctactaatgctttatgtccattatattcagcatgaaaatgtggtggcatatggtcattataatacatagtgactctaatcccataaaataatgatatctcaggcatattttaccctctttctatagaaacaaatccgcaatattacatcaatagtatagcggatttacatccaaaacacaaattacaaattatccttttatttcctgtattctaaatgtttatgtactacgaccaatattacaattcaatcaggaaaagaaatgccagtccataataggtcacaactgccaccagatcattcactgtagtgataagaggacctgacgcaaccgccgggtcaatctttatcttgtggaaaaacatcggaatcactgtgcccacaaggcttgaaattgccattgccacaagcagtgaaactcctacacagcctgataccgcaaatgctccaagccatgtgtagcccttgaacagatgcacatatattccaagaaatacaagtgccattattccaagcaagccaccatttacaaggcctattcttacctcttttactacaagcaaaagcttctgcttaccgcttagattctcatccatgagcactctgattgtgacagccagtgactgtgttcctacgtttcctgccatgtcaagtaccagcgactggaagcagatgactatcggcaaagccgctaccacattctcaaatattccaactacggaagacactatcattcccaaaaaaagcaggatgataagccatggcattctctttttcatgctctgcagcgtggtctccttcagatcctcctctgcggtcagtccggcgagctttgcatagtcctcacccatctcattgtctaccatctctacaatatcatcagatgtgatgacaccgagtatatgcttatcctttgagagcaccggaattgaatcctcagcgtagtccttgattgtgtcgatacaatcatcgattttctcatggtcgagcacatatggatatgaatgggctataatgctttccagattcatgccctccctggctgtgattaaatcctttaaatcaatagctcccgcaaagcattcatctgaatcaaccacatatatagtcatgatattgtcgttttcgcccgcctgcctcacgagctggctcatagcctgcttcactgtcagaccgctcggaatacagatgtagttggttgtcatatagctgccgatttcatcatcgtcatatgacagaagcatcctgacatccttttccgcttcctcatccagatgctctacaatctccttcttgtcctcatcctccagattttcaagcaaatcgacagcatcatccgaatccatcagcgatactaccctggcagcctgctccacagacagctcatcaaaataggcctgcggctcatcaagatatgcaaaaatctcagctgtccgctgtgttccaaggagcctgtaaagacgtttgcgctccttctcgttcattcctgcaagcatatcagcaatatcattctcatgataatctgacaaaacctccagaatttccttatccgttttgtggcttctcaatagaacaagaagctcttcatatttctttgtattcatctccatttctctcctttctcatttccgatagcattttccacataaaataaacatatgtggttctccaaaatcccgggattttggaacataaaaatcattccatgatagaaaggacgaaacccgtgcactcaataaatttgcgcacgaaaaaagcacctaacggtgctctgatatataaacaagtatgcatttgtgcacagcaaaatacagcacggcgtaagccgatattccttaatatgcctacactgtacctctaaaaactgtccggtgatgaatccttccacggacagaatccactatgcctgccaatacaatactcacttgtatatcagcaccgatgtcgttcttacttcgcccaagaccatcactactgtccatgaaattcacctccatacttaaattcttaatttctacaattaaagtattaaattcggtatacatcaccggcctgcagatatctgtcacgtccgtaaatcctaccaaactcttaaccgtagaaattgtatcatcaatatacacaattttcaacccattaattatatcttaagacacaccatacctacattttacaagcacgaagcgtaagcaccgggcgaagaccggtgcacacacgcgacaattttgcaacaacgtaaggggcgtaggtcccgggtctcggtgtggagtggcagcgtatgctctcgcgtgagcgcatagcgaagctgcctagatactgtagaaattatgcccatgaatcgagtaggaggcggtgactaaccgccgtcctctcacagcaccgtacgtaccgttcggtatacggcgctttcaatagttgacgtgcacagactgataggctgtggctaaatcgtaaaagccactgtttatcagtctttctttattcagcgcccaaatcacagctttgttattgctgatataccaatactttctgcgactgtttgctattgttgccgcatagtgttctgggattcccagcttgactagatttttatatttcgttctaggtttcttccactgtttccatatgcacatgcgtattctgtgatagagccatccgttgatatcatctatgttgttcttcatgcttgcaattccgtagtagttaagccatcctcttgcatatactttgattttctcaaggcttggcttgattgactgacatcgcttacgggaagataactccttcagtctggacttaaacttcttccatgacttcggatgaactcggacatatatgccttttccgttccttcccaatgcaaagccaaggaatttaaaatttcggattgcaaacacgctgactgtacggctcttttctcggttgactgtaagtttcagcctctcctcaagatattttgtactgctttccaagagtctctctgatgctcgcttgctctttgcaagaagcacgatgtcatctgcatatcttatgcatggaacacctcttttcaggtattcctggtcgaactcattgaggtagatgtttgccagcaatggtgatagatttccaccttgtggtgagccttcctctgtgtcaatgaccactccgttttccattacaccgcttttcagatagcgctttatcaactgtactacacgttcatcttttacattctttcgtagaagattgatgagaatttcgtgattaagagtatcgaagtactttgacaagtcaaggactacagcgaatgtatagccttgttctgcatactccttaaccttaagtattgcatcttttgcacttctgttcggacgatagccatagctaccatctgcaaacagcggttcatagattggcactaactgttgggttattgcctgttgaagtgtacggtctatcactgttggtatgccaagctttcgcacaccaccatctggtttgggaatttcaactcgtcttactggagacggagtatactttccacgataaatgcggtcagttatctcttgttgatgttcctttagatatggaagagcctcttcaatggtcatgccatcaattcccggcgctcccttgtttgccttaactctcttatacgctctgttaaagttgtctttatacagtatcgtttccaaaagtctcggctgtgcactgtctctttctttccatatccgattgaatgacctggacgctttcacatacccttcatgttccgcattatctctttgcgaacagccattgttttcaatgttttctgccatagacggtcattcctcctttctcggtcatactcaagactcctactgattcggtccttcacctctcggctactatgacctctgctgacttctatgcgttcagcattgctttatgcaatggttacctctttcaaggcataccgcacagacctccctaggtaccacacgtttcttcctctccatccatctgcctcatttatcatgcatgattccgtgtagttattgggctttaacatgggttgctgtcttacccacatgcatgacctcatatgagatttctgttcgtcagaccagagatttgcccgtgagttggtatattcctcacatccagcttccttcagattccatctcacgatggacacccttgccttcggctatatccttcccactaccgggcggattcgggactttaacccgttagaaacgtgcgccgctaggcgcacaacgcagaaatgccccgccaaggacggcggggcaaggattatatgcgccatggacggcgcatataatccggtttcgtcaagcatagaaaccctaaaagcataatttcgtacagaatcttggctgcgaagcgtagcgaacgcgagagtacatgccaccactccacactgggacccgggacctgcgccccgtccacccaagaaaaaattcattaaaatctactggttctctgtcggttcatctgtctccgactcactgtcgtgctccactgcaggatccacatatgtatacgtattctcagactttctgaaaatggtatcactagatccaacctggcacacagttatctcatcaccatcactgatgtcttccttattaatagcaagcacacctgctgagagataagtcgaagccaccttggagtcgttgatataaaccttactccagttggtaaagttgtgaccgtaaatatatactgtatcactggtcgatgaatcagacacatttgtgatgtccaccttgtcaattcccatgacaagatctgaagccggatatagatctgtgccgttgtagcagtagcgctttccataaaggatatcgtactgtaacaggtcaagtccatcctgatatgatgcctcatctgtactgttcatctgagtctgatgatagttcatgatagttccctcatggatacctacagtgtctgtagtctgggcaagaagctggtaagcataaaggtcagcatcctcctttggcagtcccatgttgttccatgtgatgtactttgtcttgtagatatcacctgacttcatatcagaattctgaagtcccattgtagggaggtgatcgccaaacataacaacgatggtgtcctcatctctcttagaaagctcatctgtgagctccttgatgaagcggtcagcctcgttgagctggtttacataatatgtccaggcatttttcatgccctcgtcctcaacacctgatacggtgtatgtaggattttcaataacaggctcctttggatagtcaccgtgagtgccaactgtgatgatataagtaaaatcagactgatttggtgtagcatcaaaggtcttcatagtctcgctgacgagaatatcatctgtaggccagcttccgtttggagtgtactctgtgatattcatgagctccttgcttgtaaatgtatcaaagcccatcttagaaaatgcattggtacggctgtagaaattaccaccgttgttgtgcactacatgtgttgcatatccaatcttagataaatcagaggcaatgctctcgcaatctgtctgctttaagatagtcttgtatggatactctcctgtaccgaaatactgcatgctgagtcctgtaagcatctcaaactctgtgttagcagttcctgctccgactacaggtacattcagatatccgcttgaatagtttttctcaagctcatggaatgtaggaataggatcctcattcacctgaaggaaattaatctcgtccgggtcacagaatgactctaaaagcacacagatgatgtttggaccggtctttccgtccactgtggtggtctgcttctgagaattgaccttctgctctacatcttccacattctgcttattgtagtcatccggctttttcattccacggtccactacggtagatgagaatgagtatacaaatccataatcatcatagccctgggcgatatttgaatagtagctggcaactacattggtattctgtgccacattagttgtgacagggattgctacgaaaagcaatgctaaaaatgccactgaaacacctgcataacggattttgcctgtatatttaggccccttgataaaaagtgccacaagaaacagtgcaaatgcaccaagtccaactacaactattgtagcctgctgcgctgtgaaatagctggtattgttcatggctaaaagctccggaatacactttaaatcagtataaccaaacggtgtgacacggtttgaaagcacacagccgttgatgattccgaggatagtccaaaagcctgtaattattacccttgcaaaagccctgcgcctgaacagatacacaagtgaaaatgatacaaacactaaaaatgagttgtacatgaacgcaagtgtatgtgcatctacgaacttacatgcagagataaaactcctgcgcgagataatctccactataaatacgatagccatagctatgattgcatggaataaaagcgaatatttatttaaaaaatcaattctgcgataatatttttctgaatgaatcttgtctttctttacaaagagcttttgtttaatgacattcaatacatcaaatattttcttcatattttcctcctatttgcctttcttttaccttctctttactacatgataatatagacaaaaatatgcacaaaaacaagggcatttttttataaaaattgacgttaaaattattgtttttgggtaaatattgataataaaattaactctttttccctattttggttgttttcgtaaattttgagtataaaaactattgtttaatccgtgggtaatatgattatgaagccaatggattgaaatgtaaatagggaaatcgcatatttaaagaaagtttaatatttggcagtgcgtggcgaatgccacagattcaggtgccgcagaccacacacccagcagctacgctatgcgattaagattctgtacgaattatgcttaaaggttttctattaaatacaggcatatataccgcacccggcggatatatgcctgcttcattacgaaatatttaaatgtgctcaagtacttcggttgcttttgcgaggtggtcgttttctatgctgtagaaatcacccttatcggcgatagctgcatatgatgtatcgagtggcagcttgccaagtaccggtactgaaagctctttggcgatctcgtctatatggctctctccaaaaagctttatctccttgccgcagtcagggcatttgagatagctgaagttttctaccacaccaagcactgtgatatgcattgcctctgccatgttgtaggcctttttgacaatcatattgacaagctcctgtggtgatgtgacgattacaattccatctaccgggagggactggaatacggtgagaggtacatctcctgttcccggtggcatatcaacgaatagatagtctatatcgccccatgctgtctcgttccagaactgttttactactccggcaatgactgggcctctccaaataaccggatcctcctcgttgtccatgaggaggtttactgagatgagcttgatgccctcttttgtctcatacggatgcatcaggccgttttcgtctccgagtatctggtcatgtgcgccaaacatctttggtattgacggtcctgtgatatcggcatcaaggatacctaccttgtagcccttctttgccatgtttactgccagtgaggatgtgacgaatgattttcctactccgccctttccgctgacaactcctattacatgcttgatgtttgaaaatttattctgctctacgaggaagctctgtggtccgccattatgtgatggacagccctcgcagcttgattttgtgcagcttcccgcgctgctacagctactgttttccggcatttttatctccttttcctatgagaaagcaattgttgtatttcacaaaatatatttgtgattgcgattacttctcatatcctgtgtttatttatgtgtttatcgttcatatttcatacgacatctatataatgtagtataacacgtatgtagtattttttatgctttttttcaaaaacacccctattcccacctgtttaatcgtatttatttcgtgactgtttcccggaaattcagccaccttttcatgttttgtcactacatatcaataatcgtgctacgttttccctttttattatgtggatattcacgcagctttataacataatcgagcttcttgtcataaatgattgtcaaggagttaattaaggttaattaatgtaaattagtgaatttttagaatagcattgctaatctctccaaatactactataattataattaattcatatgaggagaataacagatgtgtcttacaattgatgaacttagaggtttgtgtactcccgacaatatttatttaacactgcatgcgtcaaaaagacttgagcaacgtggtatcctcattgacgatgtcatatcatgtatcatgaccggtgaaataattgaggaataccctaatgactatccatatcccagttgcttaacacttggaaatctgaatacaaaatgtccattacatgttgtagtcggttccaatcacgaacagctctggattatcaccgcatactacccgtcttcagacaaatgggagtccgatttaaaaacaagaaaggagaattgatattatgaaatgcttcctgtgcaaaggtgatactgtcaaaagtaccacaacttatatgactgcatataaaaactgttatattattataaaaaatgttccatgccaaaaatgttcacagtgtggtgaagagtttattaatggctccacaatgcaaaaaatcgagtccattatatcaaaactaaaatccatgctaccagaaataactgtaattgactttcaaaatgcagcctaaatttcacataataaatgccggatgaaatatcatatttctatccggcattttcatttataacctcattattttttcgctttaaacttcattttcaattaaattttctcccattttcaacaacaaaaaccgccaccagcgagcttaccagcagaagcatcggataaaacagatacggcagtatattaaaggctgacacctcatgccccagctcgtgtactgccgatatagccacgagcatctgcgctccatatggtatcatcccctgaaaaatgcacgaaaatgtatccagtatagacgctgttttacgtggggttatatcatatttctgagccatttcctttgctatcggatttgccataactatagcaactgtattgttggcagtggcaatatcgataagtcctaccagaagtcccataccgagcagtccacctcgtttgcccctgaacatcctgtaaatacccgaaagcagagcatcaaagccaccatattcacggatcagcgcacacatggctgccacaagcactgcaaccatacaggtttcaaacatacctgacgctccacttcccatattggtaagcagatcgtatggtgctgtatttcctgttgcaagcattatgaccattcccgatataattcctattataagcactacaaatacatttattccggcaattccaccgaatagcacgagaatatacggtactatctgcaacagatgatattcctgcgatacagcgcccgcgatatctgtcctgaatgacagaattgctataacaaccagcgtcattactgccgccggaagtgcaatgaaaaaattctccctgaatttgtccttcatctgacagccctgtccgttacatgcggcaatggtagtatctgatataaaggaaaggttgtctccgaacatcgcgccacccattacggagcctatacaaagcggcagaccaaagcccgatgcatccgatactgctgccgctatcggcacaatcagtgttatggttccaaccgatgtccccatcgcaatagacacaaagcatgccacaacaaaaagcaccatcaccgcgaaccttgccggtatcagtgacagcatgaaatatgccacgctctccgcactgcttcgacctactacacccacaaatgctcccgcggtaaggaaaatgagcagcattgttatgatatttttgtcagccagtccctgtgccattatctctagcttttggtcgaatttcacactacgattctgcagacatgccaccagtattgccacgaggaatgctattatgatgggcacattataaaaccccatcggaattttcattatatattcaaaaagtattcccaatcccagatacagtacgagaaatactgctattggtaacagggctattggattttgttttttcacgtttatatgtttccttgacatttttttagcaatttttatcataagtaatcatcattagtatgtcaataataatatgctatttattataattttatgtaactgttcagtaccttcacagttgtgagccgcaagtgtttcgtactgagttaaaaggatagcagacatttgtcatactatttcttccttaacccatatcgactataacctctatatattaaaggcaacagtacaataaatagtaagatgtataagaacatcaagaacgaaatctgacgaaatacaaacggaccaatctgaaaaagaattggcgacctcactacattaagaatattagtcaatacagtcggcaacaaattgaaaaaagcatcaaatgccggtaatactcttgcgataaacggtatcatacaaagcaggaaaaacgggatacaaaccgccagattcggtgtatgcatcttaactgtcaccagcattgtcagtgcagcacaaaacatcgttgcgatatatccgcccacaagtatcagcaaataatattctccatatgtcataacataaatactatatggatcatcaatctgatacggtgtgaaaaatccactcgttcccattactgcaaatgagataagagacaatatccctactccgatccaatagataaccgttgacacgaagattcctgcaataatcttgtttttgattgccttcgatctaccatactttgtagcaaaaaaaacatcctctgttccggggcggaactctccggaaaatataccggctaccaaaaaacctatgatcactgccattaatagtacataagtttgtgcgtacattgtcatcgtagcccaggaaccttttgcttcgaacgtaaaaggtatttctatctttttataaacgttttccagataacttctcttttcaggtgtggttccgtactcttctgccattttcttcatattatcttgatagattgtatagatgtcctgtaattgttcatctgagagctgatacactgcaccttcattccattctgaatccggagtcaatacgccaattacaaaactataaatatcgtaatatgactgtactgttttaccatattctgtattaggtatctcatcttgatacttagccgataatgtcttgtaatcatttatcacttcggaaattttctccgttgtaagtttccctttccattgattgacatcttcagccagaagccgtcccgcgtcaatacctgtgtggctctgtccgtctgcatccgtatagctcatactcccaattgccatacctgaataaataaccgtcatcacaagtactgccgcaagcagaaccttattcatcctctttgaaaaaatctttttcagttcatatttgaacatcatctttatcacctgccttttctccaaaatacagaagaaatgcatcctctaatgttgcctccacctgtactgcatttccggtcggtggcatctttgaaaggactctcaactctactccatcagaaactgtccttacatttccaatcagatattttttcatataattgttcaactcacttttaggaataatgcaattccacacgaacatatccatagacaaaatgatctcatctgaagtccctgtatagaaaaattttccttctttcattaatataatctcatttgccacatattcaacatctgacacaatatgcgtagacaacagtacaagacgatcttccgacaattcactgatcagattacggaacctgattctctcattcgggtcaagacctgctgtcggttcatccaacacaagtatccgcggatcattcaacatcgcctgggcaattccgaccctccggatcatgccccctgataaagtccgcatctttcttttcctcttttcagccattccgacctgctccaacagttttaatgcccttttctttgccatgatgggcctgattcctttgatagatgcaatatacagcatgtagtcatacaccgaaagatcaggataaaacccataactctgcggcaaataaccgagtatttccctataagatgcccccagactaaagatattctttccattccacaagatttctccgcttgttggggttatcgctgtacatatcatccgcattaaagtggtttttcccgctccatttactcccaataatccatatacacctttccccatagaatgtgttacatgttctactgcgtgtacattcccataatcttttgttacatttttaaattgcagttccactcgacttcacctcccagtttatttcacagttacattgcgatttgtgaacacaaaaaataagataaccaaacgatatgatcaacaagctcccccagattggcatcgaaatcctctgataaatagaatctgtcgatacaatcagtgtccagataagtatacatgctatacttaggaaaacagcaatatactccatatcattccatctgctgtacaataaccggaagcagatacaacaggaaacattaaacggcactaagaaatctatgatgagtcggtatgccgaaatctgtaatgtataaactgaaacaccgaaaaaaaaggtagtcataagtaaatccaccactgaaaacagcaatatccttgcagcacagatccggcgcagtgaatagaatgctgttttttcaatttccactgctgaaaagctccgattcttccaaatttccggtatgatcattaccgaaaacatcactgacatagcccccagtgttctctctgtatttgctcccacatccgagtccacaagcagtatccaaagcagaattaagattcctccttgcagaacccaccatctctttttgataaatttgaactgctcaaataaaaattcaaaatatgatgctcgtctgttatcctgtctgttcataatgtctgaacaccgctcttttactgtgtgaacagccgtttcccgtatatattccttctgtatcaaggatttatactcctcgatttttctctgatattgcttcataatttttccacctccaactgttttgccagcaattcttttgcctttgaaacacgatattttacaagcgacaattttatatttaataaatcagcaatttccttttgttttaattcctgaaagaaaaacaggattacaatctcttttatttcttccgggagctgctccagagccctctctatatcaatccggatttctatgtttttcggattctcatcttctatatccggcaactggtctgtcattatttccttatttttcttgtaattattctttataatattccctgctatgctatacaaatagctctttgtcttcttgatctctgccccgcttattagtgctccgaagaatctctcaaaagtttcctgtaccatatcttccgcatattcctgattatgagtatgtaaataacaatattgatagatagaagaataatacttttcaaccaactgattacctgcttgattgtcaccgtttctgattttctgaactaataaaaaatcagcaatcatctcatatcacctctcttgtcctctataataataagacaacttaaggtgataaaaagttagtgaaaaattaatattcatttaattttttataattttcacctcagtgactcgatatattcctccgcacgttcttttgcctcccaacgtgaatagccttcatcctgatacttttgaattctctcattcataatatttttctgatcctgagttgtcctgtacccttcccttacaaataattcaagtccctcagttctggcatcatcgaacatctgctgaagctgaggataaattctcgaatccactttttctccatttgataattctgtgagttctacctcataattacgaggaatacgataatcgtcatttacaagaatcagattccacccaaaagaagtatctgcttctcttccaaatagattgaaactattaatcattggaatttcaccctgaatcgctatatacgaaacagcccgcaaaaaggcagcaaaaagagtcccccttttgctgcctgcaaacaattttgttttcaatttaatggtatcaagcttgtacttgacaaaatgaaaaaacatgagttcattccgactaatcgtcttacagtaacatagtcatataaattggtatatacataattccgtcctgatattttaaatccttcgtataaataatgaatctgtgctcacactttaactgatatttctgaagcagatagtcaaatgatttgtgcgacatatagtttgaagattttacttcaatcggacatatcttctttttcttcacaatcataaaatcaatttcatatttcttttctctggtcgttccctccggcacgtacaaatattcatgaaaatacaactcatgtccagctgctctgagcatctgtgctacaatattttcaacaatcattccctgattaattcccagattgtctataatcagagccttatataaatcttcatctgtactgtcccggttcttcataatctgtgtaaccaatagtccggtatcacccatatataatttgaaattgcttctgtccgcaaacagctccagtgcaacctccggttttgtcacattgatacactcatttcctatcattgcttcagaaataaagctgaccgcatccatataattctgataacgcgcatttttatctaccatagaaagtttgaaatgtgaatttttattctctagctgctctggtattgttcgataaataactgacgctttttccctgttttctgtatcgtattttgccagatcctcttcgtaaaggctcagaatattccgtttaacaaaatcaatttgttcataacttttccctgaaacataagcatctactgcctgcggcatcccacctacaaccatataggtacgaaagcttttcataattctccggtgaatcgcatctccaagtggctttcttttttcaaaagcttctctgatcgtaggaattgtaacctcatcattgattgcccataaatattcttcaaaatccatcggatacatcttaatccggtactcttccgaaggaatcagtatatcctttacatttttccggattgagattagcgagcctgtctcaatatattcatatcgaccatcagcgacaagatattttatcgcctgccgtgcctgcggaaacaactgtacctcatcgaaaataatcacgcagttcttcccttttaaactttttcctttcagaagaaataagtttctgaaaaaagtatccagatcattcatgttctcgacaaaattattttttacatcctggttttctcttgcaaaatcaagaatcatatagtcatcatattccttttttgcaaactcctctacaatggtacttttcccgatacgtctagccccttcaagcaatactgccgatgttcctgctgccaatgctttccactcaatcaatttggcataaacttttcttttaaaaatcattcagcattcctcatttcattttacttggtagtattatagcatatttccacctcaattctaccacttttcacgaaaatgcaaaatgttttcgcctattttttaacgaaaaacagaaatgtttatatcaagtttttaacgaaagcacaaaatgtttgttgtttcatttcttaaatgcgttatttccggtttattcgctcagaaattcagccaccttttctatctgcgcactattgtactccatgtattccagataatactttttcacggtctcattctgcacttcttttttatagagccactgtcttgttttagcctctggtgcaaacagcactgcctgatattgtggagaaaatatctcatcgaggctgcaggctgatttgtccagcacgcaattgtagtccatatttttttccgcaaaataccggttcaatgcttccgcaaacttttttgcttttctcacatggacagcatattccaccggattatacggctctccttctattaccggcacctgccatactaaaatacattttttcatttctttgtactcctcctaatatataagtgtagggtttagataccccaacagccagttgggttctatccctcttattgctaaagctgtacaatgatgaggtatcggtctgacagtattctccttggactcaatagacgtccgtatgaaagccagtcagccagcctatcatttgcagccgttcgatttatgcaggttggactgccctgtgcacgtccgtttgataccccaggagattgaataagcaatgagaaatagctggacaccatacaaattcactttcggaggtacgagaatgtacaacgcagtaggtattgatgtatcaaaaggcaagagcaccgtcgccgtcctgcaaccagcaggtgttattattcgtaagccttttaatgttaatcacacatccagtgaactggatgagcttgccaaatatattggcagtctggaaggtgaaacccgtgttgttttggaatgcaccgggcgttaccatgaaccagtggtaaaaactctttctgaagccggtttgtttgtcagtgctgtcaatccacatctgatcaagaactttggcaacaactccatccgcaaagtcaaatccgaccctgctgatgcgaagaagattgcacgctatactcttgacaactggatagaactgcgacagtattcaagtatggataatacacgtactcaattaaaaactttaaactcacaattcagcttcttcatgaagcaaaaggttgccgctaaggctaacctgattgcactattggataatacctatcctggtgtcaataaactctttgacagccctgtccgcgatgatggcagtgaaaaatgggtggattatgcttactcattctggcatgtggattgtgtccgcaaaattggattaaaaacattcacggaacgctatcaagcattctgtaaaaagcatcactataatttccaaccagcaaaaccagcggaactatttcttgcatccaaagaccttattgctgtctttccaaaagaagcgtcttataaactgcttattcagcaaagcattcagcagcttaatcttgcttcttcccatgtagaagaactacgttcaaagatgaatgaacttgcttctactctgcccgaatacgcaacggtaatgggcatgtatggcgtgggaaaaacttttggtccccagcttatagcagaaataggtgatatttccaatttctcacatcgtgaagcattgactgcttttgccggagtagacccaggtgtggatcagtcaggcacccacaattcaaagagtaataaagcatctaaatgcggttccaaccgtctaagaaagactttgtttcaaatcatgtctacactgcttcaaacagctcctgaagatgataaggtatatcaatttcttgtcaagaagcgtgcagaaggaaagccttactatgtttacatgactgctggggctaataagttcctgcgtatctattacggcaaggtcaaggaatgcatccgtaatttagagcaataaccaagtctaaactcatttttcttcaaaccggcaaatatggcggttcaaaacttgtgcccaaaatcacaatcataaaaataattcattttactattgactttttattagcaggctttcatttttgccaaatttatatagatatcttttacacgctttgtaaccccatctgttaaaagcactgtttgcattcccatgcactcttatttatacatacaaaaaccgcaataacaagcatcactatcagaacaggtatctgcaatgcaagcgcattgtacgaaccaccatatctgtaacgttccactatcatcatgtgattcataaaatccgcgaaatcccataaaaagtgcaatgtaataacgacaccaatacttttagtcctaagaaaaatgacctccaatgtaaaaccaaagacacaagccataatcattgtgcaccatttattaaacattgtcatatccgcatcaaatataaaattcgtgatatgtgccaaaccaaacaacaatcccgaatacacactggcaaatactattatattgctattcttcctaagcacgcactcagtaacaaccgatcgaaacatcaattcttcctctattccaaccgttatatataaaagcacatttactacaatatatcctatcaatccgcttccatacagtccttcatgtccaccaaatatccaaagcgtagaatttccaatctcaaaaagagtaaacatcagcaccggcaagccataaatcccgacacctttcaagtatccttttacaccacccctgcctgtctttaccttaaaaataaacataagcactacaattgtcattatatcaatgcaatttcttatcgtttccgcgataatatagtgttcctgcatgatcggtatacaattcattatcacagaaaagaccaatgtcctgtatacaatgaataatattaccagaccaagtggtaatattatcactttattcaatattgttttatcaaatttcatccttttattgttcctctgtttctgccctttttactaattattgtaatcgtatattttaggtacatataaatataatttatctttgctaattttcaatataatatcattagttagccatctatcatacttgctctttttacaatactttttttcagttacattatcaattattatctctcgcttcatcttttgggttataatttgttcaatttgcttaattttaccggattcattttccaactctatacaaactaattccgctccatttccttacttttatatttggcatgatttcggtgccatttgacccaaactactgttatggttaatttatatctaataaatttaagactccaatactagatattgccataatgacaccagcaagcattataccgcataaacatgccataatgctcttcttaaaatccattctcaatatactggctgcaagtattccagtccacgcacctgttccgggaatcggaatacctataaagagtacaagcgcaataaacaatccccttcctgcggtatcttgcaattttcgtccggcactcttgcctttttctatacaaaatctaaaaaattttcctattactttcttattttttccccattcaagcagtctatgcgaaaaaaggtaaacaaacggcattggaagtaaatttcccaatatgcatatggcataagccggtaaaaccgacactcccatagcaattcctgttggtatcgcaactcttagttctgccaatggtatcattgaaatcaaaaaaattattatatagttcatattattttgctaacattatttttgttaatatcattacagcaccaatcagattccaagtgccgtgtattgaaatatttgtccagatatttttgtattttttataaataaatcctaaaagtattcctgacaaaaaatagtctaaccattgacacaaaaatagtagtatatttgtgtttccaaatgaagaaagcatatgcattgttccaaacaaaaatcctgtcaccaatactgcacacagttctccatatttgctgaaaaaccgaaacaatatacctctataaattatctcttcggtaaaaggtcccataattacactcatgataacagccaaaataggataatccacaaaatatccactaacgtttgactgatttgccgaaaccgatgtatttgaacacactgtcatttcaatgattccagcgatgcagcttaacaagaatgcaattcccacacctgccaaaactctttttatatttacagaaattcggtcagctttgaattttttaaatgaagtgatcaaatattgcttcattgccactccaatcatgataatcaaagtcaactgataaatcatatttatcagcagcccataaaatatatttttttcttttaaagtagaaataataccactagctcctatgagcataaaacaaacatgaattattacgactccaactattagctttttatgattcatatcagtggatatataattgttttcttttttcatctctttgtactcctcattttttactaaatttatacagacatcatttatagtcttttatggtcttttacacactttttaaccccatttattaaccaaatacattaaattatgcatcaaattgatgctcatatgagctgctatcccaaaaacaacatttcctctttttatataaaccagacaaaacgcgattccggctaatacatattgtattgattgcagacaaagctcatttaaacttattgcccctatagatggtataaaatgcattaatccaaatagtactgatgatacaatcactttaattatcagactttttttgatagagctgaatataaaccatctaaaaatcagttcttctaatatgggtcctataaatgcagaaagaatcataatagcccaataatgttctttcattgtcattctgagcgtaatttcatttatgctttgctcattatttccggatgacaaaataaacttcataataccacctaatattgtaaacaatactattacagcaaatgatttgatatatcccgaagctattgatttgatatcatactgtcttatctgttttatatctcttaaaatccctgttccataaaggctgaataaaataactatagctataagattccataaatagtttgttatcagatacgcatccgaataactcattgcttcaaataccgattgtataacaggcaatatgatatatttttttcctatcaagtaccaggccggaaagattatccagccaatataccatttattgttttcttttttcattaccatttctgctttcattgacttttattctgcaatgtttcttttttgaaatacagaaagagctatcaatgaacacgtaagaataactattgctgaagcaacctctcttatatcttgcaccacaatgactaacgataaaatttccaaagtaatactgatgcagcatgcagttctaatgatttttgcgttttcattttttattttatcatatgataatttccccacccatacaaataggacacagaacagaacaacatctaaataatgtccctttttcacaatattaaagaaatgtaatattcccatcaaaaatgcaaaaaatccaataatttgcatagataatgtatattttttatgttcttcgaaataactattttgaaacaatataggcacaataattatccatacaccacaaaataacaatattctttccatattttacctcgtctttttttataaaattatcttgttgctaaataccctaagcctgctcctgttcctgcaacttcacgcattttacttatcccaattttatatccgttatgtctgcagattgttgcaagacacgctgctccacagtcggttatatcgtgctgttttatacaatagtatttcatccttttattgttcctctgtttctgctttttttactaattattgtaaaaatatctttcgtatattttaggtacatatatatataatttatcttttctaattttcaatataatatcattggttagccatctatcatacttgttctttttacaatactttttttcagtgacattatcaattattatctctcgcttcatcttttgggttataatttgttcaatttgcttaattttaccggatttattttccaactctatacaaagacagtggaaggacatacaatatcatagctgcaatatatgtgaaaaaaggaacaaatattgatactccatctaccagacacaatcctgtaaatataagcataattaaagtaacaatccatgtaaaatgtataaaatactttttattcataattccgctccatttccttacttttattaaagacattgttgttcatgacaagagacataatcgatatcataatgtcttgaacaacaacatcatatcattttttatattggcatatatgcaccaataacacctcctgtaagggcaccagctacatagcctcgatataatgttccgccagaaagttttccttttgaaataccatatccaatttatatctgatttaattttaatatgctatcgccccacacaactaataatccaataaaccataaacataataaaaccaattccacaaaattccttttttaagttgaatttattaacattggcttcatctttaataataaacattgttttggctttaagtatcactattatggcagcacttattacaaatataatttctgttaaaattgtatatctcccgctcggtatataaaccgatattatcgctccaaataaattaaatgccatatgcagataaatcgcataccttactttacctgtaataagtacaatattcgcacacactattcccataaaaatggtatataaaaactgttccagatttgcatgtaacataccaaaaagcatactacttattaaaattgctgtaaccttgccatatggaagcaattcttccaacagcacctttctgaataatagttcttcaaatacaggcgaattgattacaacacatacaaggagtatccatgccggtacatttcctatataattttcaacaacacccacattttctgtatgaaccagatatcgcttaataaactcaagtataatatccgtaattcctgacaatattgttgtgccacccaataaaacgagcagatatccgatgccatcccaaaccgagaattttttatttaacgatatttcatttatattgattttcccgatttctttagtaaaaagtctgaaaaaataaaaatatcccacgctggcgatgctaccacagataaccttaattgattgcatatctagtggtaaatttaaagttcccataataactaatactacaccgctcaatatgcttgaaaacaacatagatataagcaaagctccacttattcgactaatttttttcattcttagattatttccttttcataaggtaacctaaaataaatactattttaggttaccttccataatattatccgtatatatgtgatacaccctcacaataataatgaataattcgtcctacataatatcccattaaatggaacacatttttcccaccatcaatattcaacatatcgttttttgtcagttcacaaaacatattcaatatcctccctactatttacattttctgcacggttttttaaaaccatcaactactccacatatgaagtcatacgctggctgaatcaacccgatccagcctaacccttttccaccatctgttgccatagtctcattcattgtcatttcagtaaaacgattgtttacttcaagattcatatttccatctctctttcttatattattatttctcttatgcgcattgttaagaatatatataaagcaatttcttgcctcataccatatttaattgttttgtcgtacagcagtgcaccatattttataccgactgtgttttataaagccaatttctaatttttccactcagatactttatgggattaactaatggtcctgttacgcatcctccattaacctgcataagcatggtgttattcattgttaccaatctttctgttgttttcatcatctactctcctcccgaattcatctgaaatttttgcctataaatttttcaattgcatggcataaatcccaagcagaaagtaacattccacctccatcatgtttcatcaattctctttcgtctaattcaacaaacatcccttgcctcctttcgaaattaaacctatcatcatatatttaccatttcaatactttaatgctatttggtaagatttcggtgctatttagcaataaatcgtaaaaaatactttaatctttgatttattttatttataatacaaatataatctttatggaggctgcaagtatgtatttaatttacaaactttacttttccttaattaacaatcttataattgtactgtttttatttcgcttctcagaaaataatatgcacactgtcttttccataaaaaaaaaaaaataatagtttttactcttgcttcactgtactctattgtcccattatcaagatttgacttaattatttctaatgtctttttcttattgacactttattacctgtctgattttaaacttaaacaaagtattataattcttataaaatttgaggtattactccatatagcatctgctattatatgttttttacatagcctgctattttctgatgctcaattgctatatgataatgtgatctatcaggattacaaatccattcttgtggaaataatagcttacgttgtttattgtctatattgcaatcttttcaaatcaaataccatcaaaaacatgtacttgctactcttcaatatcactattttaggcatttgtttattgttaagttacataaccttgtacatctgctactcacttccaaaatcctatatgctttcagctatttttgccattattttcgtacttattatcatatgtatttcactatatgataaatttctggcagtcattgaagaaaacactaattatcggttcaaactggaacttgataaaatggaacaggtatattctgcccagctcgacgataaattaaatcagctccattctttaagacatgatatgaaaaaccatctgatagtaattgatggttatgcttcacagcacaatgataggaaaattcatgaatatattcataatatttgtgaagacctttctctgacaaatgctgtagattcaggctctcatatcgtctcagctcttatagcagaaaaagaggacaaggcaaagtcacaaaatatcagatgcgaaattaatataagtacacccggtattaatattgacgatttttcaattacgaccataataggtaatctgtttgataatgcgataaaagcagcctctgagtgtgaacatggctgggtcagattctccatcacccagaccggctcatatatgaatatagttattgaaaattcctgctccggaaatattatagaaaacaatggtgaatttacatctaccaaaaatgacaaggtcttacctcatggaataggcataaaaaatgtccgtaaagtcgtttccaaccttaacggacacattgatttttcttatgccagcggatattttagcgtaaaggcagaactccctaattatagttaagttcctgctccttatatgctctccttatcttgtccagatgaagctcctttatctgatcatgatatttcctgctcaaagggacctccatgcctcgtccaaagcataccacatctttttttacttctttaatgtggttaaaattggctatgtaaccctgatgaatatacataaatgcatcatgatccaatctctcatatatcttttttaacggctcataacagcttatttcctcatcaattttatggaatacacactggtttctgcgtttttctatatataatacattttgaaggtctatgagaacatcttcatatccggatttaatttttagatatcttttttccgctttttgtgcatttttacgataatcaatctgaatttttgctttttcgataatgtgctttacctgtgtatattttatcggtttcatgacataatcaagtgcatcaagtctgaatgcctgtatcgcaaatgcatcataactcgtcacaaatgagatacatacccatgggtcgatttttcttaatgcatcagccatctcaatacctgtcataccgggcatttccacatcaagaaacaataaatcatattccttactcttagaaagtatattattcatgagttcttttgcattatcatagagatctatgctcatattaacatccatttcatttccgtattcactcacgaatttttttagttcattccgaaaaaattcttcatcatcgcatattgctgctcttatagtttcgtattgcatatattaaattccttaaaatccccctataaccaccttacagtccttctaagcgtcttacagttacaatgtcatatatttatgtaattgtcgcggtctacctctatcacggtatagtaattctttccaagctttttcctgacattttcctgtattgcattgcatatatcatcatctgaggtgatatagccgaatggaactgcaatgtcaaaaaccagattcgtatgtgtatcacctctgataatacggaaatcgtgcatatttatgtgcgaatcaagcccttttatcacagagagcacctcggccttcagtccggctacctcctcgtcctctatcgctaccgggtccatgtggatggtcacaatacagcccagctcccttcgtatcctgcgctccagattatcgattatatcgtgcagctcgaccatatctccgtcctccggcacctctgcatgaaacgatactatcctgtgtcccggtccataatcatgcaccataaggtcatgcataccgagtatgtttttgtcaaagtccagtaccatctccttaagtctatcgacaaactccggctccggctttgctccaagcagcgggtctatcgcctctctggctgatgatatccctgaatagaatataaacaatgacacaaatacaccgcctattccatccagattgagtcttgaaaagtgcgctatgagtgtggctgcaagtactacagatgtagcgatacagtctgacagactgtccctgcctgttgcttcgagcgttgatgaatcaagcttttttgaaaaatagaaattgtataccgccatgacgcattttacggctattgatgccagtagtatcgctacaataagccatgaaaactctatgtcctgcggctttatgattttgccaaaggaatccctgaacagctcaaagcccatgatgagtatgattgctgcaactgccagtgtagccacatactccatcctcgcatgtccgtatggatgttcctcgtcggctctctgtgccgccatcttgaagcctgctatcgtgatgattgatgaacctgcatctgacaggttgttgaatgcatccgcagtgatcgagattgcaccgctaaacattcctgcaaatagcttgccggcaaagagtatgaggtttaaaaatataccgactataccgcacagcatgccatatttatttcgtttttcaatgtctgtttctgtctttggcatttactttacctctatttttattttatatcctgatttacagcttatttcaccgctccgaatctgtcgaacgggtaatatctgaatatcgcttttgcaagtatatcgtccttggacacatatgtgtgctcccagactcttgcgtctgatgagccatttctgttgtcaccgagcagcagatatgagtcctgtggcaccttaaactcgtaaggtccggcatttactgtccacgcatcctcaccgctctggtttgacttgagataatcctcctcaagcgcctcaccatctatatacaccttgccgtcctctatggtgactgtctctcccggcagacctattacacgcttgatgtatttctcagaaggcgaatccggcgcattgaatatgactatgtcccctctctttgggtcagaaaatgtatatgcgagcctgaagccaaatatgtcatctccaatctgtatggtgttctccatcgagcctgacggaatatttgcatttataatgacatagttctttatgagtattgccgctacaatggcgaatgcgattgttaacacccagcttaagatttccttgacaggtgatgttttttcctccggcttttttggctccatctcatcggttgtttttgtgtcttcttcgttgtttaagtctaatatctccattttcatgttctccttattcatgcttcaataagtgtttgataatatatgtcatggcggtacagcctatggtgccatccaccactttataaagtccttccttgtaaaataaagacttgtaagcccgtaatctgcgatttccctatctgtaaaggtctttgctatatacgcattgatttcatccgggaagtctctctcgaggcaccactgtgcctgcaggctcattggcttttccagctcatattggtgcacgagctcgcctccaaaatctatgatactgttccatctggatgcattgcccagtatcctctgcttgatattttctatgatcacagctcttgcaatccttacctttttgtacttttcggcacgctgcaaaagcattgcattgcggttgtgggtatttatcaccagctccatcgggtctgtcagctcatttgacaccagacaaaatacagggtccagatcataatactccggtcttaacacgtagtcgtttcgaaacgttgctgctgtctttgccacggttaggtctgccgatacatccgtgtatatgatgcccggcatgtcacccataacatactccatcgatatgatatacggtgtcataaactgccagaaggctctgatattctgctcaaatactatgatatcgtacttgtcaataaactgaccataatcataagggtagttctccctatagtgggcaaaaagcgctctctgcatgaaagctatctttattttccgcccgataaagccgtttattactgtcctcaccgggacctctacctcgcgctcctttatatatacaagcacctgtacagctctgcttaccagctcgttttccgcctcgtattcacataccagccgttttctgccatctgacagatactggccaagtgtaagcgggctctgtccaaaggcatctatgataatctgtcctatatactggcggagctctatgagcttttcatcgaaggctgctccgtctcttgatatgcttatatttaaaaacctctttttgatattgagctgatacgagaaattgtctatccatgatggtgcaagccccagtatgtctgtagcatctgacacaagaactccctgctggtacagcgtggacttatgaaaataccccttgtgctttggatgatatatggcaacatagccctcaagcaggctgttatccactcgtatgatattcatgccaacaagctcattcatcggatagttccactttgcctttggctgtgacaggcatacctccctcgtatcacacctgatatttacaggtataggcagtgtaagcatatagtgctttatggtttctactataaagtccagatctatatacggcgcatatgatggttttacggggatagagatgcgtgtgcccggtgtctttttctgcgatatgacatactctatctggccactctctccaaaccactttgccatgaccggtgccgtatcctgcggattgcttatgttccaggcagtgtttattaccttatcctttttcgactcgatgagcacagcctttgagactgtaaagcacgagcatagcccgatgccatagtgagaatacggctcatacttcagctgctgattgaagaaatctgtgcttgtataatagcttgcccctatctgtgcgataaagtgctccaggtcatattcatttatgcctactccattatcctctatcgtaaacagtcttgtatcactgctgtacgtgatgtctatgcgtggctcatatatggccctgacatcgcgcatctggcttgcctgctccatctcaaggaactccgtgccccagctccactcaagtgcctgccgcacattgcaggcatccatggcattgagcaaaagctccctgataaagaccttccacgaagcataaaactgctggcttgcaataagcggaagcatatttgattttcctaactctacatcgatgcttttcatgctttatccgactgcccgtaatagctgccgtagtaattgccatagtacccactgacatggctgtttttcttgttgtttaccttgttgagcacagcccccagtatcctcactcccgatgcctcgagctgttttttcacactctgaatcatcctggcgctcgccatgccctgtcctatcactattatagctccgtcacaatactttgctacaactgccgcatctatggcagctcctatcggtgcacagtctataattatgtagttaaagtgctccttgccgaaattaagaagctcctgaaagtattttttctcgagaatctctgtcggattcggcacagacggccctgcaaatatcataaaaaggcccggtatttccgtgccatacatcacttcctcaagacgtctctgaccggaaagatagtgcgacaatccgcatatctcccctccacttgccgctgtggcacgcagacgccctgcaaggactgatttacgcatatcagtatctatgaaaagcactctatttcccgactctgtaagcgaccgcgccagatcaagtgccacggtgcttttgccttcatttggcacagagcttgtcacaagaagcgtgcgtatatcatccccgcaaaactgtatatttgtcttcaaagctcgaagtgattccttcatcgtatagctttgttcttttagcttgccaaattttactaattccatctgcccatctcctgatacaggctcccttatgctgaagccgatttcttttttcttttctttctgtggctgcctctgccatgctttctgccctttccttgctctccgtcatcttccgattcatcaagcggaagtgtaccaagcacgttcatgccgagcttcttctccacatcctctgtatctatgattgtatcattgaacagataagaaaccactataaccgcaatcgacagaaatgctcccgcaaaggctcctatcactgtgtttttgccgatattagggcttaccgcgcctccatcatcatatccgctctggatgatagtcggcggatcctgcttcatcttctccgctatatatgctgatgcgacctttgctatttcatctgctatggtctttgccatctgcggatcgggatccgttactgtgatattgagtactcgcgagttggacggattatcaagcgtcaccctgccgccaagtgttttgtagctctcattcagattcagattctctatgacctgatccagcaccggacgtccctttactacaactatgtaatcatttgtcaggctggtgcctgtctggatatccgcaaggcttgtgatggatgtgctctttgaaagtacatagagctcagatgtagattcatacataggtgtaatcataaatctgcttatcgcaaatgccactgcacctgttgctatcgtaacaagaattatccactgccaatatgaaattatctcaagaaacagatcctttaagtctatctctatctcgttgtcaaaatcctgttctctctccattacgtatccccgcatttacactgattatcttccgtttattatattttccggtgtggtctgcatgatttcctgcgcgtagtcatcaccgaacttctttgccacgtactcatagcattttttcatgttgcagacgcgctcctttgtgccatggctgtcgcttgctattacatcaacaagtcctgccttcaaaagcttctttgtatatctcttgaagtgtctgccatctatgccgagcactgagtctgcattgacctgtatgagcgctcccagctcctgcaaatcctctatacggcttatatcactgagacactcatatctctctacatgtgctatcaccggtatatatcctgcaaatatagcttcgcgcgtcatcttgtatacaaacgagtattcgctggaatgtgaatactctgtaagtatatactgtgtatctgccagtgtatgacacagcccaccatgaaaggcatctatcatatcggttgccacatgatactctgtgccgagctttatttctattccaagcttctttgcatatggcatcagctttttatagtgtcgctctatcttttcaagcggatgcttaaacattccatggcgcaggtgcggtgtgaggattatgcctgtgatgccctgctttttggctatcttgagcatctctaccgattcctcgagcgactttgagccatcgtccactccgtataataaatggcaatgtatatctatcaaaattcatggtcctccgttttgttttcctgaactatcattatactatatacagatttttcgtgcaattctttagatattaaatttttcttcttttttgttgggagggcgtggcgtaagcgccgggcatccgtgcagcgcacacgcactcccgcgcctgctacgctacgctgctaagagaactgtacgaattatgccttggggtggttctatgcttgacgaaaccggcttttatgcgccgtccatggcgcataacgccttgcccggccgtccatggccgggcatttctgtttttcttgggcataattctacagtctctaagcagcttcgctattcgcctgctcgggagtgcgtgtgcgctgccggatgcccggcgcttacgccacttacgttgtgacaataatttacaatttgagatataataagtattcgaggttcaaatatcgatgatatttgaacctcgggggattatgctattattctatataatgatatgagggtcaaaaggtatacaacgaattacatgcaagcatgcatcgatgataccttttgaccctttaatcatataattatattatccaatttgtctgacgagatttatcatttctattgcaccgagtgcacagtcatatcctttatttccggcttttgttccggctctttctattgcctgctcgatgttttcggtggtgactactccaaacattaccgggatttctgactcaagtgatactgatgcgattccctttgatacttcgttgcacacatagtcatagtggcttgttgcacctctgattactgctccgaggcagatgactgcatcgtattttccactttttgccattttctttgcgatgagtggtatctcaaatgctcccggcacccatgctacgtctatgttttcctccggcacgtcgtgtcttacgagtccgtcctttgctcctcctaaaagctttgatgtgataaattcattgaatcttgctactacgattcctaccttgattccatcctgtgtcatttttccttcgattacgttcattttttgttctccttatgttttttatttttactcagatgagtttatctgcaattattaactatttagaatttgttactattcagaatccccgcacacattgcaaaaacgctcgatgcggtgtactaatatgagagtatgtgtcccatgcgtttctgcttggttttcagataaaacaggtcatgcgcggtggcgctcatctggatcggcacacgctcgctgatttccatgccaaattctgagagctgatataccttgtcagggttatttgtgagaaggcgcaggctgtgtacgccaagctctcttaatatctgggctccgatatagtactcgcgctcatctccggcaaagccgagtgccagatttgcttcgagtgtgtccattccctgctcctgaagctcatatgccttcagcttatttatcaggccgatgcctctgccctcctgacgcatgtagagcagtattcctctgccctcctcgtctatctgtctcatggccgcctcaagctgctgaccacagtcgcagcgctgtgagccgaatacatctcctgtgagacactctgaatgtactcggcagagcacatttcttccatctgcgatttcgccctttacaagtgccacatgatgctctccgtttaatctgttgacgaagccatatgccttgaattctccgtatttggtcggcagctttacctctgtgacacggtcaacgagcttttcatgtatctttctgtattcctgaagtgccgctattgtgatgaacttgatgtcccatttttttgcaagctccatgagctctgttgtgcgcatcatggtaccgtcctcacgcattatctcacagcacagtccacattcctttagtcctgcgagcctgcataaatcgactgttgcctctgtgtgtccgtttctctccagtacgccgtttttctttgcaagaagcggaaacatgtggcccggacgtctgaaatcctcaggctttgcgtcatcagagacacatttcattgcggtgattgagcgctctgctgcggaaattcctgtggttgttgagacatggtctattgatactgtaaatgctgtctcatgattgtctgtattttcctgcaccatctgcggaaaacgaagcttctttacatattcctgcgacatcggcatgcatatcagacccttgccgtgcatcgccataaagttgatgttttctgttgtggcaaattctgccgcacagatgaaatcgccctcattctctctgtcctcatcatctgtgacaagtattatttttcctgcacgaagctcatcaagtgcttcttctactgtgttgaatttcatattttatgtcctcgtctttctattgtgattttatagctattgcgttacatgatttttaacccttcagccccacgcacatttgcaaacccgcacgatacccatgcttttatgttagaagccgtattttgccaggaaatctcttgttattccttccggttgttttttattttcgccggatttatgtggtacattttccttaattgtctgtgttcctgtcatttcttctgttattccatccgactgccctttaaacaacagcttctcaacatattttcctatgatatctgtttccagattcacgacagctcccacctttctgtcctttagaacagtctggcttactgtgtgcggtatcgctgatatcgagaaattatcctctgccacctttgcgactgtgaggcttattccatcgattgtgatggagcccttctcgactatatagcgcatgagctgtggtgtggcctgtattgtataccagatggcattgtcatcctttttgacctccacaatcctgcctgttccgtcaacatgtcccgacactatgtgcccgccaaatctgccatctgccgccatcgcacgctccaaattgacatgtgctcctctcatcgcatttgcaagcgatgaacggtttagcgtctcgtgcatgacatccgctgtaaacgcatgtggcatgagccttgtgaccgtgaggcagataccgtttaccgctatgctgtctccgacctttgttccagctagcactttttcagctctgattgtaagtactgctgagtttgctccacgtgaaattgtatctattgttccaacttcttcaactattcctgtgaacattgtatatcgcctttcttttttaagtattcacaacatcactctcgatgaggaaatcatcaccaagctttgttaccttactgtttccaagcatcacggcatgtgccggcgagtcggctcccattccctctatcggagtttttgcatccgcccctccgaaaagctttggtgcaatgtaagcgtataccttattcacaatcccgctcttaagggctgaccagttgagtattccgcctccctcaaacagaatgctgtctatgcttctttcgccgagcttttgcatgaggtcatttaaatcaatatgaccgtttttttcagctacatacagaatttctattccgttttcttcaagccgtgttatttttctgtttttttgataattattgttttcttctatactatctttttcagtatcaggcaaggcttctgaatgtgcggtttcacgatatcgctcactgactgcaactatcgtcggcacttcctttgcagtatttactatctgcgattccagtggaagcttaaggtgcgtatcgcatattatgcggattggatttactccgccctcgattctgcatgtaagcagtggatcgtctgcaagcactgttcctattcctgccattatggctttatatctgtggcgcaggttttgcacatgttctctcgctttttctcctgttatccactttgatagtcctgaatatgtggctatctttccatccatcgtcatggcatatttcatagcgacgtatggacgtctggtctgtataaagtaaaagaatacctcgttcagcctgtcgcactcgtctttaagcacctgcgtgacaacctctatcccatgctctttaaggattttgatacctcccccggcgacaagcggattcgggtcatccgagcccacatatactctttttataccggcttctatcactgcctccacacatggcggctgcttgccatgatgacagcatggctcgagagtcacatacatatccgctccctgtggcgattccttgcaatgctttaacgcatttctttccgcgtgcagctctccgtatctctcatgccagccctctccgattatcctgccgtcctttacaatcacagctccgaccatcgggtttggcgaggtatatcccatgccgcgttttgcaagctcaatcgcccttctcatatattgttcatcagtcatttgggttcctttctgcataaaaaagccctgaactattatcgttcagggcctaatgatttcaaatatcataatctcagataaacatgcacaagctgcatttcatcataaatgaattttgagacaaaaaaaatctggaatgtatcaaaacactccagagtagatatctgttataactatgatatgtgctgtatctatatctgaaactgaatctgaaacccagctatctatactctgcatatatcatattcacatcttctttcatccagactttactgtcggcttcggaatctcaccgaaatcatgccttgcggctcgtgggctataccaccggtagggaattgcaccctgccctgaagaataattatttaattagcttacgctaaccatagtaaacctttgtggcttgtatgtcaagattatttttataatgtggagcatatttttttataagttgtcgtgcaatttattagaatggaatttttaaagagccagcaccttgaatgggctgactctttcaatgtcacctgtaattgataaattggaattttcttaattcttcatcgctggtttttttcttttccaattaatcagtagaccaatcgtggaaataacaaaaattaatgccgatgttaaagaaataattccatcagtaaccacaaatatgataaacgtggctaatggaatataattaagaatacttttcaaaattttcatgtccaatcctcccttagatttcataataggtttttctttattttaccacatgacaaagggtattggtattgttattttcgttctttgatgactgattctatgatatttatttcttcatcagtaaggttgtattcttcgtaaagctcttggtctgtaaatatatgcttatttccacctgccttataactaccttttatgatataatctaaaaatcttaaaattttttgtaacaaaacaatcctttctacgtctaacctatgaacaaaggaggtgacagttctggattatgagaaattgtacaattcctattacttgcaagtatactcatatgtaatgacaattgtaaaaaatcaacatcaggctgaggaaattacccagaatactttttataaggccatgaccgcaaagaaggcatatgccggcaaatcaagcgaacagacctggctttgcagcatagcaagaaatctggcaatggacgaatgccgaaaaagcacaaaatttacagagcttgacgaagagcagctcgaacaacccgataatatggtaaaaagcctagaaaataaagataccgctcttcagattcatcttatactgcacgagcttgatgagccctacaaggaggtctttcagcttagaatatttggtgaattgccattctcccaaataggcatgatatttggaaaaacagagaactgggcacgggtaacttaccatagagccagactgaaaatcaaagaaaggatggatagaaatgaataatccaattacacaatcaaccgatgaaacctgcaatatagttcaggatttactcccactatactatgacgatgtatgcagtccctcaagcaaaaggcttgttgaaaaacaccttaagacttgtgaaaaatgtcaaaatacatacaatgagctaaaaaacgattctattgattcaatgataaaaaaagaggccgacagtgtattaaagcagcatgaaaaaaaggaaaaaactgctgcctacaagaccggagtcataatagccggactactgcttatcccaatactcatcactttcatagtgtgcctgtcaaatggcgatggtttaaatacctttgcggtggtaacagcatctatgcttcttgtggctgcaatgacagttgttccacttatggcacagcagaaaaaacttaccaaatgcataatctgcggtgtttttgctctgcttttgatattcttttttgttgacagaatgtatagttcaaatgaatttatgctttggtctgttccaactatatttggattatcaattgttctttttccgtttgtcatccgaggaattgagcttccacctgctttatcagacaaaaaagctcttatcactatgctgtgggataccttatggcttttcctcacaatcattgaggtatgtggtcatacaaacgatgttgccggaatgaaggccggctgtattatagcatttgtctttgtacttgcagcctggctcatatttttcgatgcacgatatttaaacgcaaacggatttataaaatccgcaattatagttttgatagcttcggtttggacagcttttgccgatgacatatgcgagtttttaattttgggcaccagacaaattactataaagtccgtgaatttttctgactggacttccaatatctgcgtgaatgccaatgtttacgctattgtgcttgtgtccggtgttattatcgcctctatactttttgtagcaggcggtattaaagcatttgctaataaaaaaataaattagttttctctttgaaatattattacaaaacccctcccacagacttctatctgtgggaggggtttttatagtcattattcaataagtgcctacaagattagcaaacaccctgagcaagcatagcgtcaactactttctcaaagcctgcgatatttgcacctgcaacatagtcagtctttccaccaactgttgcattgtatctcttagcagcatcactaatgttagcgtagattgtctccatgatacccttgagctttccgtcaacctcttcgaatgtccatgaaagtctctcagagttctggctcatctcaagtgctgatgtagcaacaccacctgcattggcagctttaccacctacgaagagtactccgttctcctgaagatattttgtagcctcaagagttgtaggcatgttagcaccctctgttacagatgtaacaccgttagcaacgagcatcttggcatcctcaatgtctaactcattctgagtcgcacatggaagagcaagatctaccttgtactgccatacaccgtgctcaccgttctgctttgcatgatactcagcagttgacttagcagctgcatactcagtaagacgggcacgcttaacttccttaacttccttaagaagagcaacatcaattccgtttggatcataaatccatccggtagaatcagaacatgttacaaccttgacaccgagctgctgtgccttctcgattgcgtagatagcaacgttaccagatccggaaactgctgctgtctttccctcaaggctcataccatgatctttccataatgcgttagtaagatataacagaccatatccggtagcctgtgtacgtgcaagagatccaccataggtaagacccttaccagtcagcacaccttcgtatgatccacgaattctcttatactgtccaaataagaagccgatctctcttgcacctgttccgatatctccggccggtacgtcaacgtctgctccgatatatttgcaaagttctgtcatgaagctctggcagaatgccatgatctctctgtcagatttacccttaggatcgaaatcagaaccacctttaccaccaccgattggaagtgttgtaagagaattcttaaatacctgctcgaaacctaagaacttgataatacccaggtttacagaaggatgaagtcttaaacctcccttgtatggtccaatggaattattaaactgtacacggaaacctctgtttacctgaacctgtccgttgtcatctacccaaggaacacggaacatgatctgacgatccggctctgtgattctctcaagaatcgcattctttctgtataattcctcatttgcatcgattacaggtcttaaagaatcaagaacctctgttactgcctgtaagaactcaggctgatctgcgtttttcttctttactacttcgagtacttcatcaacatagctcatttttatatctcctttacaaaattatttttcacatcaacaagtttattttatataaatctattgctataatcaagtaatttttgaaagttttatataaaaaaaattcattttatttattatcttcatttatattatcccagttttggtactgattctcctcgtcatcggaatataccaccttgaaataatccgagagttttgcaagtgaagttataagaactttcatttcgtcatccgaaagatcgtcctttatatgctctatcatatgacggtgaaactgctcatgatgatagtatgcactctttcccttgtcggtgagtgaaagctttaccacacgcttatcctcctcactgcggatacggttcacgtatcccttgcgggtgagaccatctattgcctttgtcagcgtgcccagagtgatagacataagcttggctacggtgccggagcgctttggctcatcgactcctattgcctctattatatgcatatcgttgatagaaatatcagaaaattcgtctgttatcagacatctgccctctatctctgtcaaatccttgaacagacacaccaataattcatttaaagtttcatctgccgtcataaatacctctttctattgccactctatggcgcaggctccccatgtaagtcctgctccaaagcctgataaaattattttttcctcatgctttatcataccatctttgcggactttatcaagcaaaatcggcacacttgccgcagaaatatttccacactgctgtaaattggtcggaaatttgtccataggctgcttaagcctcttggcaaccgactcaataatacgtatattggcctgatgcagcacatagacatccacatcatctgcgctccagccgatttcatcaagcagctcatttatagcctttggcactgtctttaccgcaaacttgtatacagcaggaccgtccatggtgacatagccaccgagtgcagactgctttccattgtcggtaaacggattgactactggacggttgtctccgtcaagcgcctcaccaccttttccgtccgacccctgtacaaagcccttaaaagcatcgccctcgtctgtcacaacggctgctcctgctccgtctccgaagagtacacaggtgcttctgtcattccagtccattatttttgaaagaacctctgctcccactacgactgccttgtgaaatctgccggtcttaaaatacgcatctgctgtggcaagcccgaataaaaagcctgagcatgcggcatttatgtcaaatgccactgcactgcctgcacctatctcagcctgaatctgacatgcgagcgatggaacgattttgtctgtggatacgcttgccgctattatcaagtctatctcacttccgtcaattcccgcatcctgcagcgcactttttactgcatcacaggcaagtgaggtggttgtctcagtcgttgcaatgtgtctgtttcttattcctgtacgcgagctgatccactcgtcagatgtgtccattatggctgccaggtcatcgtttgagaccactctctgtggcaggcagcttcctgttccaactatcttcatagaatttcctttccgggactagaacttgcggaaacgcttatatctttcctccaagagctggtcctttgtcaatttgctttctttttccaagaatttcttcatgttgcccttcatgtagtttccgattgatgaaagggcatcctcgtcggctccgccaaactcaggtattatatcatccacgacatcaagctcctttaagtcgtgtgctgtaatcttcattacctctgcggcttcctttgcacgctttccgtccttccagaggatagatgcaaagccttctggcgagaggattgagtatgtggcattttccatcatccacacttcatttcctacagaaagagctaaagctccgccgcttccgccttctcctatcatgagacaaaggattggcaccttgatgccgctcatctcataaaggtttcttgcgattgcctcaccctgtccgttttcctctgcttccattcccggataagctcctgatgtattgacaaaggttatgatcggacggttgaatttctctgcctgcttcataaggcgcagtgccttgctgtagccctcaggtgatggcataccatagtttctctttgcgcaatcctcaaggtcttttcccttgtgaacaccgataactgtgaccggctggccgtctaaatatgcaattccgcctacgatagccgggtcatcgcggaaatatctgtctccgtgcagctccataaactcatcaaagatataatccatatagtcaaccgatgcaagtctcttaatctgtcttgcggcgctgaccttatcccataccttaaatggcttagcctttgcctcgcgctccttcataagctctgtcggctcgtaattgtcgtctgagtgaagcggatcaaaattggcatagccagtggtaggtctgtgagcacgtaaaatcttgtaaagagtcttctttaaattctcacgctcaactatcatatccacaaagccgtgctcaagctggaactctgccctctggaagccctcaggcagcttctgtccgatggtctgctcgataacacgaggacccgcaaagccgataagtgcctttggctctgcaagaatgatgtctccaagcattgcaaagctggctgtcacaccacctgttgtaggatctgtgagtacaggcacatataaaagtcctgcctctgaatgacgctttgctgcggctgaggtcttagccatctgcatcagcgaaatgataccctcctgcattctggcaccgcctgaacagcagaataatataaccggaagtctttcctctgtggcacgctcaaatgcgcttgtgattttctcaccaaccacatgacccatgcttcccatcataaatcttgaatcaattacaccaagcactgtctcctcgccgtaaatctttgtcttaccgatgacaatgccctcagaaagtcctgttttctcctgagtctttgcaattttctcctcatactcagggaaattgagaggatttcctgttgtaagctctgtaaaccatggctcaaatgcttccttgtcggaaaccattctgattctgtttttagcacgcacacggaaataataattacactcatagcagacgtatttgtgctgttttacaactgatttgagcacagtcttgccacacttgggacaaacgattgtctcaggggcatcctcttttgtttcctgtgctacaccggcatttttgccatctgcggctgttttttcgctctcagcgttcttggctaaagtctcttcagcctctatatttttatctttcttcttgaataacttcatattgtctccttatgcaattaacctattgcaaatgtaagctccgccatacaggcaaccttgccatttaccctggcaacagccttgcccacaccgataggacctttaacctttataatctcagtggtcagctccagcgtatctcccggaaccaccttctgcttgaacttggcattattgatgcctgcaaaatatgcagtcttgcccttccactcatcctgacaaagaatggcaactgcaccggtctgcgccaaagcctcaataataagcactcccggcatcaccggatttcccggaaaatgtcccataaaatgtggctcgttcatagtcacattcttcttagccacacactttacgcccggctccagttcctcaaccgtatcaatgagaagaaacggactgcggtgcggcagaatatccataatctgctgcgtattcataattgacatatacatctatcctttctcaatttactccaaactatctacacgcttcgcgctccacaacgtggagccggaaagcgcacagtgtgttcagaataaaaaatattaactgtcacggcgttccatccactccaatagcatgaagcactaacaccatatcacagcctgtccgtgcaaaatgccgtgactgacttcatattttttatgaggaatatactgtgtgctccaccgaacctcacagcctaaatgcgcgaagcccctaaaaagcagaagctatttatctacatgcttcgcgctccgcaacgtggagctgggaagcgcacagtgtgttctgaatgaaaaatatgaactgtcacggcgttccatctgctccaatagcatgaagcactaacaccatatcacagcctgtccgtgcaaaatgccgtgactgacttcatattttttatgaggaatatactgtgtgctccaccggacctcacagcctacattcgcgaagcccctaaattatttataagccttgagcagaatacttgcattatgtccaccaaatcccagtgaattgctcagtgcatactcaacaggctcctcatagctgtccttgcagtaattgaggtcaatctcctcatcaggagtctcatagccaacagtcttatgtataaatccatcctggatttccttcacacatgttataaactcaacagctcccgctgctccgagcagatgtcctatcatagactttgttgaattgattttaagatttgcagcctcatcaccgaacgcaagcttgattgctcttgtctcaaagagatcattgtgatgtgtgcctgttccgtgagcattgatgtattttacatctgccggtgtgacacctgcatcgctcatggcattggtcatggctcttgctgcgcctgcgccatcctcctgcggagatgtgatatggtatgcatcagatgagcagccgtatccgactacctctgcataaatctttgcacctcttgcctttgcatgctcaagctcctcgaggataacaactcctgcgccctcacccattacaaagccgcttctgttcttgtcaaacggaagtgagcactttgtcggatcatctactgtagaaagcgctgtaagtgctgtaaatcctgcgattccgataggacatacactgccctctgtaccaccggctaccatcacgtcagcctcaccgtactggatgcttctgtatgcctcaccgattgtgtttgttcctgtagcacaggctgttacatcattgatactctttcccttgagaccgaactggatagaaacatttcctgctgccatgttacagatcataagcggaacaagcagaggattgactctgtttggtcccttttcataaagcttttgtgtctcgcgctccatagcctgaagacttccgatacctgaaccgatggcacatccaaccatgtatggatcttccttttcgatatcaagtccgctgtcatcaattgcctgctttgcagcagctacagcgtactgtgagaatggctccattctctttgcagcctttctgtccataaaatcctgtggattaaaatccttaagctctgctgcaatgtgacatttataatctgttgtgtcaaattttgtgatgtggtcaaatccgatttttccggcctttaccgatgtccagaaatcgtccacattatttccgattggtgttactgctccaagtcctgttacaactactcttctactcatattgccattcctccgtcaacagacagcacctggcctgtgatgtagcctgctgcatctgatgctaaaaataatactgcgtttgcgatatcctttgtgtttcccggtctgccaagcggaatctgtgataaaagattctcctttgccgcatcggcaagcacatctgtcatctctgtctctacaaagcccggtgccactgcgtttgctgtgattccccggctggcaagctctctggctacagcctttgtgagtcctataactcctgccttgctggcgctgtagttggcctgtcctgcatttccgagtattccggaaactgatgaaatattgataattcttcctgatttctgcttcaagaaatagcgtgacatgtgacggattgtgttgaacgcacccttaaggtttgtgtcaagcactgcgtcatagtctgcctcgctcatcttcatgatgagaccgtctcttgtgattcctgcgttgtttacaaggatatctatgtgcttgtactccttgatgagcgctgttatcatattctggcactcgtcaaaatcagatacattgcactgataagaaactgcatcaccgcctgctgcctttatctctgcaacaacggcatctgccttttcctttgaaccattataatttactattacaaaggcgtgtgctgcggcaagtgtaagagctatctgtcttccaattccgcggcttgcgcctgtaaccagggcatttttacctgttaacatacttttcaaaatcctccagtttgtctatgtttacgacttttacgtctctatttatctttctcataaatccgctgagtgatcgtcccggtccgatttccacgaactcatcggcaccatctgcgataagacgctcgatggtctgctgccagcgcactgacgatgaaacctgctgtgtcagataatccttgacatctgccggtgacttcacatagtctgctgtgacgtttgtgatatatggcaccttgatatcgtggatttctacactctcaagtgcatctgcgagcttttctcctgcacccttaagcattgctgagtggaaaggtccgctgaccttgagcggtacgcatctcttggcgcctgcctcgctgcatgctgctgcggcggcatctactgctgccttttctcctgtgataacaatctgtcccgggcagttatagttggctaccgataccactgaatttgtctcatctgctgtctttttgcagatatcctcaatgacctgcggatcaagtcctaaaaccgctgtcatggctccacctgtaggaactgcctcctgcatgtagattcctctttttctgacaactgcaaatgcatctgccatagtcatggctcctgatgcgatgagagcaccatattccccaaggcttaatcctgctgtgacatcaggtgtgatacctttgtcaatgattgcctgatatatagctgcctcaactgcaagcatacatatctgtgtgtactctgtaatattcagcttgtcattttcctcaaagcataatgccggaatatccaagcctgtctgttcactggcaaggtcgattactgcctttgcatttggcattgtatcgtaaaactccttacccattcctatatactgtgagccctgtccgggaaacataaatactctcttacccattttcggtttctccttatttctgacaggataccgtaagccacgctttgcaggcggcccggtatccttaaatttgcatgtaaaagtgaatactgtctatttgttcagtcccactacatcctcaatgatttctttgcaggtttcctctttctttacgaggcctgcgctctgacctgccatgacgctgccatatacggtatctccgtctacaacggcttttctgagtgcgccaagtgtcattttttcgagctcttcaaatggagctccttccttttccagcttgagatattgtctggtcatcttgtttctgagcactctgatcggatggcctgtgctcattcctgtaacctcggaatctatatccttggccttaatgaccttctgcttatagttttcatgtactatcgattcttttgcggtgacaaagcgtgtacccatctggactgcctctgcaccgagtgcaaatgctgcattgaagcctctgttgtctgcaattccgcctgctgcgataacagggatgctcactgcatcaacaacctgtggcacaagtgtcatggtagtctgtgctccgatatgtccgcctgactccattccctcggcgattaccgcacttgccccgcctctctccatgagctttgcgagtgctacgcttgcaactacagggattacgatgacgcctgcttctttccacatatccatgtactttgcagggtttcctgcgccggtggtgactacctttaccttttcctcggcgatgatttttgctatctcatcggcctccggattcataagcatgaggttgactccgaacggcttatctgtctccttctttgcagcgactatctgctcctttacccatgaagccggggctccgcctgctccgatgatgccaagtccgcctgcattggacacagcgctggcaagctcatgggttgctacccatgccatgccaccctgaatgaccggatatttgattccaagaagctttgttattcttgtttccatgtcttttaagcctctacacctttgttcttaagatactcaatgatgtcgttaactgttgcgattttctctaaatcctctgaagggatttctactccgtactcctcctcgagtgccattacaagctcgaaaagatctaatgaatctgcctcaagatcctccttgaagtttgactctaatttgatatcatcctcgtcgattcctaactgatctgctacgatttccttgattttctccaacatatttctgttctcctttttctgtgtttattttcggttttatgtgctggtatatttgcactagtttgcatgtcaaatattttcatcatcaaatcatttgacagtgaaagtatatcacatttaaaatagttgtcaagtcaaagtatttttatttttcattttttatggtacgggagcaggcgggcagaaaattacccatccaaaacgtctcctaccagcagccaagaggctgtaagaattgtaagtcaggttttctatgcctgacgcagccggcttttacgcgccgtccttggcgcggtaacgcctcgcccgtgcttccatgcacgtgcgctactgtgtacctattacaattccaacagcctctaagcagcttcgtacaaactcattggatgggcaattttctgcccgcctgctcccttacactgtgacaataatatacactaaaaaacagactgtaattatgagtggtcagctcaattttacagtctgctctatattaatctctcaaacacccaaccggcacaacccgaactcctgactccgtggtatatgccatggttgcatttgcgcaaatcacaatcagtgccgatggttctttatatacatcacgtggatgtttttctttttccaatgctttctcattatattttaagataatatccttgaatcgcagcaaggatttttccgcttccggaatcttgttcaccccggtttttatttcaataagcgcataacggccgtcctccaactgatagactgcatctgcttctacgcccatatcatctgtataatgcatcactctggcattgtgcttttcagcaaatacaagtaaatctctaagcaccatattttcaaatacatgcccaaatagatccaaatcgttgataaaatagtccggattaacaccaagcgcagccaatcctatagagggatcaacaaatatatgctttttggcagctctgatagctgttttcgaacgcaaatgcggtgtccaggcatctatatcctttacaacatacaatagctccagagcatctatatatgaagaaagcgttacatctgtaacattctgtgtggcttttacatctgaaaatatattcttgcgttttgctgtagtagccatatttctggcatacgaccaaagcagtgtccttgcccattccggatttctgtttactccatcaatcgctgatatgtccttctgataaatctgcctataataatccttagctatttcaagctttgcactgtcctttgaaagtgccatgcatctcggccatccacctctacagaccgcaaaaaacaaatcctcaagctttatatctgtggtaagtccatcaatatcatatgcttcatcttctaataatttaaacaacgatatgcttccgtttgattctcctgtctcaaacaaagtcatagggtacatcgtaacctctgttattcgtcctgtacctgtatggggtgtattaatcttcttacttgatgagcctgtcagataaaactctcctacactctccggattgtcatcgcacgcttttcttattgttccccatatctttggggcatcctgccactcgtcaaacagtattggcttaggattctttaaaaagagcttaggtgcagtttctgctactgcaagatacccctctctcttgtcttcatcctgaaattcaataacagttttacatcgttctcttgctgttcttgtctttccacatccttttggtcctgtgatgctcactgcattaaatgcctctgtttttctatctatcacatcatcaacaattctgcttatatattccataaatatctgctcccttcatggttattataccatttaattcacagattatacaaggttattttatgtttttcgagtgttttgttttgtatttttctaatgttttattttatatttttcgagtgttttattttacttttttcgaatactaaaaagagcaggacaagtatttctacctattctgctcttttttacatattttaattatttaaatatagattatctaccggctgttcgccatctgcttcacatagtcgagcgccttcttaaccggtgggattgatatcactatgattgtgataatttcctctactgcaaggtatgagccgttgtaggtcactgaatatatgagcgcatctatcatcttgtttcctatcgtgacaggtgcgtatgctgcaaagaacacaactcccgacagcactgcaaagaaaaatctactgggctgcttcgcctccggtggtaccaccggtagctccacctgtgcctccggttgaaccgctgcctccggctccacctgcacctccggttgaaccactgcctccagctccacctgcacctccggttgaaccactgtctccggctccacctgtgtctccggctgaaccactgtctccagctccacctgtgcctccgactgaaccactgtctccggctccacctgatggattttctgatggtgtagtaggtgttttttcatgatttccaccagcagcatctgtcttattcgtgtctgttgttgtcttatccggtgtggtggttcctgcatcaggtgtggtcacagtctgatctgtaggattattctgcgtctggtcatcggcaggtgtatcctggctgtcctgataatcatccgatatttgggcatatggcaggaaatctattggtgtaaggtcagcatgtatctgatccatgtagttcttccatatttctgccgggtaagagcttcctgtcagttttttgactgtctcaggcatatcgcagcctacccatacacatgtggtgtagtatctggtaaagccacagaaccagccatccttcttatcgtttgtggttccggttttgccggcgcaaggcatgccattgtccagattagcgctacgtccggttcctgatttcataacatctgtcatgacatctgtcatcatacgtgatgctgtctctgtatatatgacggtatccttctgcgatgatgtatatatgatattgttgtcagaatctacaatcgacttaatacatgtcggattcctgtacattccatcgttctcaagtgttgaatatgcagatgccatctccagtgtggatacacctgttgtaaaacctccaagtgctgttgctgtgacatagtcatcctttacaatattggtaaaattcatatccttgagatactgtaagcctacctttggcgtaagctcatcatatagctgccatgctacagtattcagtgacttttgaacggcaaacctgatagtcacatcaccgtaatatgaatcacccgagttagacggtcctccatcaaacttgtggtcatttacgatggtatccggtgtcttaccacgctcaaatgatggtgtatacacaatgagcggcttgattgagcttcccggctgacgatggctttggaaagcacggtttagcgtatgactgaccgcatcctggcttcgtccaccaactattgcaaccacctcgcctgtgtcgttgtctatacaggttgcagcactctgcagcttaaatgtgccatcatcggtcgtgtctgtaaagtccaaaagcgtaaggtcaattgaatcctgaagctgctgctgcatagtcagatcaattgatgtataaatcttgtaaccgtctgagtagagctttttctgacaatatgaatacatctcatcatatgaagcatcatactccttttcttcatcgtctgagtcaaagtaatacttgaacttgaaaccctcattctccatgagcgccctcgtagcgcagtaatatgcataggtatccacataattgtacttgaccgtgtcatccttctcaggcatgttgagggtaatctcctcgtttatagcggcctcatattcctgctgtgtgattttgccatcttcccttagatttttcaatatgagattgcgacgtgtcaatgtatgatccttgttgtttatcgggtcatagtatgtcgggctgttcggaatcgcacacaaaaaggcagtctgcgacaaatcaagatccgaaagctcacagttaaaatagccatggcacgctgcctgaataccataatatccgttcatgaaatagacattattcaggtagaactccataatatcgttcttggaatatttcttttcaagcgccatcgctatgaacatttccttgacttttcgctgccagttcttgttcgtatccagataaatatttcgggcgagctgcatcgtgatggtactgccaccctgggtaattctcttgttttttataattgactttgcggcacgcactattgcctttaggtccacaccattgtgcttatagaacttcttgtcctcgatactgaccatgcagtttacgaagttctgcggtatatcctcatacttcacatagtcagcctttttggtagtggccgtctcggatatctcatcaccgtttgtatcgtagagtgtactcgtacgcgccggtaaaaatgtgtttttgtcagatttctgcacgagctctaccgcctctgagtgaagcttcgcaaccttgtctgcatagcctccaaagtaataaaagcataatccaccgaggatcagtaccatcagaaaaatctgaagctttatgaaaaaccagaaaacgcgatgctgctttttcttttttttctttttctgttttgccatttctaaacgttacctccaaactatcggtataccattgtatatcggcatactttatagataattgacaactatatccaatatgtactgtctattatactacaatgcctctacatcagataattaataattgcttaattttctattatacctttatagcacaaaaggaagctaattgctccctttatcaagctattttacatctttattactgttgtagtcaagtaaatagttttttacaatgctttttgctatctctagccaagctggtcagccagaaattctgctgctgcacccgccagcttttcggcaatctcagacttatcggctttttcatcgtaaacacacagtataacggctcccgcactatcaccatcatgcactattactgctattgcctgcgcttcacagtcagctttatcgtcctttaccacaggtatcagggtatcgtcttttttactgtacaatacactttttctcttatccataatattctcgagctcttttgacaaagccttgcctatataatttttgtggtttttgccggctgccgctattatctcatccctatccgccacacataccatggctcctgttacctttgacaggctctgggcatatgcctgtgatatattcttcaggcttcccacctgcgaatacttctttagcactatcgtctcgtccgcatccatatatatttccagtgggcttccctcttttatatgcagcatcctgcgaagctcctttggtatgactattctgccgagggaatctactcttctggtcaatcctgtgattttcactttattgtcctccggttacttttttgcatttgcattcatgctttggaggtagtatatgggaatttgaataaaatatacattcggtatgcactgatacagtgctctttcataatagcttttataatgtcacagtatgttttgaatttgataagatatctatatccatcagctcacgttcatctgcgatatccacatatacacagtcatacttctttgccacacttctgccacccttatcaccctccagtgataaaagctgtgggatgagtgatgaatgaaatacacacggattacctacggtatctccacagcgaagtgaaaaaactgatttcatatttcctttattttcaagcactttatctattaatttaatcacgctttgactttttaaatatggctggtcagctactgcaaacatgtagtagtcctgcataccagtctttttctgctcctgcaccgccataattcctgcttttatggtgtaggctatgcctttttcgctgtccggacttaagactgcatgacaatcagggatagatgagcagtagtccagtatttccctgtaacgtgtaacgacggttatatctatgactgggttattcgattctgcattttttgtcttttttccatccttttttgataaaccgatgtctgtgcccatataagtatcaataacagtatccgtatccatttcatcactgtctaaaggcttattagttccggtattttttaatttattatatctatccttaatttctatcaagtggtcaagcagatgcctgtacataggttttccatccagctcataaaacagcttgttacttccaaaacggcggctgtttccagccgccatgtatatgatatgaatcatttcactcttaggtccttttcgtgccagtttgggtctgccattcccataagtattttctcaggggtaaacggaactgtcctatgccatacgcctgttgcgcgataaatggcatgtgccagcgcaggagccggtgtattgataactatctcaccgattgacttgactccgaatgggcctgacggctcatagcttgtctcaaattcgacgttgatatgtcccacatcctgtcgtgtcggtatcttgtactgcatgaaatcattttctgcgattttaccaccggcattgtaggtgacattctcataaagtgccatgccgattccctgacctatgccaccctctgtctgcacacgcgcaaggtttggattgaccgggattccacagtccacgacagcctgataatcaagtattttaactgctcctgtctccttatcaagctctatctcgaccatgcctaccatgtatggtggcggtgaaacaggtgatgaatatgtggcggtgacatctacaggtatcgtgttgttgacctgtgcttttgttgctatatcggaaagacttacggaaactgccccattgtctgcaccgtccggatttatgatatacacctctttaccgtcgaaatccacctctgatgcatcacagcccagcagctgtgcaccgattttctttatattttcacgaagctcaagtgctgcattctgtgtggccattcctgtgatgtaggtggttgatgaggcatatgaacccgagtcataaggagaagcatctgtatccgctccaaacactgttatatcatccggctcgcagtcaagtacctcagccgccatctgcgcaagtattgtatcacagcctgttcccatgtctgccgcgcctatcatcatattgtaggtgccacagtctgaaagctttaaggtacacgagccgacatctacattggatatgcaggagccctgcattgcaagcgccatgcctgccgcacgaaccttgccatttcccatatcgcggacaggatacttttctgcccagtggaaattgtccgcgcagtgcattatacatctgtcaagtgcacatgcatttgctgtctcgccaaaatatgccggcataaacatgccctcgcgtacaatatttttcaaacgaagttcaaccgggtctatatgcagcttttctgcgagctcattgacggttgattcaagtgcaaatatgccctgtgtggctccatagcctctgtatgctcctgccgcctgcacgtttgtatacacaacatcgcacgaaaatcttgttgcctcgcagcctcctgtataaagtggaagcgatttatgaccggaaagtcctactgttgtagtgctatgctctccgtatgctccaccatttgacagcgtataaagatctatcgcccttatatgaccatctttcatcgctccaagacgcacggtaacttccatctcatgacgcggtgacgcgatagtctgacactcttttctgctgtagattatcttgctcgggcgctttgtcttccaggtaacaaatgccggatacacctcacagaccgctgtctgcttggcaccaaagcctcctccgatacgcggcttttcagcgcgcaccatagactttggaatatcgagtgcatttgccagtattcggcgcaggtggaaaactatctgtgtcgagctgatacagtgaagtctgccgtatctgtctatctcacagtatgccctgcaggtctccatatatgcctgctgcgctgcctttatgcgatatgtgtgctcaattatctcatcacactctgacagaattttctccacgtttccatgctcatcctcctcgtggtgaatgagattgcgctttacatcgcctgtatctatgctggatgaccagtcatcctcaggatgcacgagcaccttgttgtccagcgactttctgaagtcaagcaccggctcaagcaccgtgtactttacttttatcatgttaagagccttgtccaccgccttttcagattctccgaccactatagcgacggcgtcacctacgcttctcacatgacggtcaaggattaatctgtcatatggtgacggctccggaaaagtctggcctgcgatagaaaaacgctttttcggaacatcctcccaggtgtatactgcgaccatgcccggcaccttaagagcgatatctgtctttacatcctcgacaattgcatttgcatacgggcttctcagaagctttatgacaagcgcatcacgcggtgtgatatcatcagtaaataccggctttccgagtaaaagctggctcgaatcctttttaggtatacattttccaactgcgtggtaatcccttctggcgcggttgaagctgttttcgttagtttgatttgtgctcatcctgccactcctttccgatatcctctccatagacgcctgcctcaagattaagaggtgcgccctccttcttactgtttaagaaatttctgattgagcgcagctgactctgatatcctgtacaacggcacagatttcctgaaagatattcaagaatttcctcgtcagtcgggtcaggattttctctcagaagcgccacaatatttacaatataccccggattacagaagccgcactgatccgctccctgtgcagcaaaaaatcctgtaaactgcttagcttcctcctcaagtccctcgagggtgtccaccgctctgccgtctgccctgcctatcggcgtgctgcatgacagcacaggctttccatccagaagcactgtacaaagaccacagttgcctgactcacagcctctcttcaccgaaaagcaattgtgcttacggcaaaagtctaaaaggaccatatcctggtctaccgagtcggttattaactttccatttaattttattttaacatccatatatatgaattccttcctatttaatgctcgtgcttaatactcgttcttaatgctaatgcattgacgccatcgcactaatagagctgccaaaattatgtttaccttacatgtgactggcgacaattacattatatcatcgcagatgtcaagcgactgtgtaacagcgcggcgtgtaagcaccctgcagatcatctctctgtactcagcgcctgcccttatattgcttccaaaacggatatgctctgcaacatattcggcaaatttatctattttggcattggtttcggagttatctgtcaaggctgcattaccatctgtctttgcatctgctatgccatcgagtatgccctcctcatcccacacaggctctgccatatatggtgatgctccgataaccgccacatacctgccgcttctgtttgccactgcacatgtgagcaccggaaagtctgttgactggtttctctggcttaagtatactacgccctttgcatttttcggtactattactgacacaagcacatcgcgcgtggttcttggaagtgccgcaaactcatccaaatccataattcccgccttgtgaagctgcacctttgctcccagtgccctgaaaatcgtcatgacatctgaaaatccgaatctgccccagatgcttcctccgacagttgccacatttctaaattgcactccgacaatgtgtctgaccgactctgcgattgcgccgtgtgtatatgcattcagtgcttcatgtgtctctatctgcctgagtgttgcatatgcaccgattctaaactcgttctcatcctcatcaatttggtcaagtccgagatcgcacaggtcaattgccgtgccaagcgtcttatttttcattttgagccagagcatgccgcccagcacaaaattcggttttttctgataaagctcataagcttcatcaaggctttgcgccctcacatattgattgtaataaaacatatttttctcctgttatcctgctatataggtaactatcagttacctcatttcgatttcatacatcgcttcccacctgatgtcatgctccttcataaaggctatgaggcactccctgtcagaaagctctgctctccatgccagcccgcagcccgccgatatgacagacggaagaggaatcgtgcgtcccggaataccacatgccttgcccttgatatcaagcttcaacggtgctgtgttagtctcgaaggtgatgattagccgttttttcttttctcttgccaaatttttatccattacctcacaccttgtataactctacggacttacaataagagatgccccagccatcttttctgcgatatcatacatgttggtcacctctccgactgcaagcttatctgacagctcatagtagttcaggcatgttccgcaggtaaaaattttcaccccacggctcttaagctcctttaaatcctcaagtgactctgagccctcacaggtcagcttcgctcctccattgtagaaaagcatggtttcaggcgggttgtcctgctgcgaaagtgcgtagatgaagccctttataagtaccttgccaagctcctcgctgccctctcccatatatgaagagcggattacaacaaccctgttatctgcggccggcctgcatgcatactgtgaagcctcgtctgtatccgaaagctcatcggcatttacagcttcaattgtcagctttacgctgtagcttccgtcgtcgagcttactgctatcacagctatagcccttctgtgcagccatcttttttaaattttccactgcaacttcattgtccacaagtgtctccaccgtatccggctgtgtgagagcctctatcgccttctttgtctttacaaccgggatcggacatgtatcccctattgcatttactgttatcatatttataatcctccctatgttattttaactcgtcagccctcaaaatgaagggcatgcagcctgtcagcaaatttgcataagctatggcagcttaaatcaactcacatatatcggcacatctcgccgcttaacaaatcgtcccacctttgcagccggaagccctgcggctttaagctcatgcaaaaatgcatctgcctcagaggcttttactgcaaacagcaatcctccggaggtctgcggatcgaaaagtacctcctccattgagaaaggtatattttttgcaaagcacaccttatcacctacatggtttctgttgcgctgggccgctgccgtgaggaaaaactcatctgcgcatcgcagtgctccggtaatgaccgggatggaaatcgagtcgataagtgctgttatatcatcatttaacatctcactcagatgtcctaaaaagctaaatcccgtgacatctgtgcatgcatgtatatcgaaagcatgactgatttcggatgctgccttattcagtgtggtcatagagcttaccgcatcctcaattgcacctaacggagcctccccgacgcggtttgcgttgcatacaagccccactccgagtttctttgtaagtataagcacatctgacggctgccctgtgttgttgctgtaaatatgctccaggtggaccgtacccatgactgaaagaccgtattttacatcactgtctgctatagaatggccgcccgcaagtgtgccgcctgcctctataaccttatcagcaccaccctgcattattttgccgagtatattcaggtccattttctcagggaaacagacgatgttcaatgcggtctttactgtgccgcccatcgcataaatatcactgagcgcatttgcggccgctatctgtccaaacgtatacggatcatcaaccatcggcggaaaaaaatcaagcgtctggactaccgccgtgtcatctgaaattttgtacactgccgcatcatcacagctatcatatccgatgagcagattgctgtctttttccccccttggcagctttgctaaaacattacttaacaaatccggaccaagctttgcagtacagccaccgcccttgcaaaacactatttcctgtggcatttttgctcctttcaattgtttaatactatttatcgcaatgccgcaatctgcataagcgcttcagcggcctcatttatctcatcaactgtattataatatgaaaatgagaatctcaccataccctgattttgtgttccaaagaatttatgcatcagcggtgcgcagtgtatgccgctccttgttgcaatgccatactcattcataagtatgtctgacacctccgccgagtccatatcagctatatttactgaaacaatcgcacagcgcataccattgtcgggcagcatatcgaaatctccatatatcctgattccggggattgtctttattttttcaataaatgcctgcatcagctcatgctctttagcgtatatattgtcgagtccgattttctcaagctccatgacacctgttaaaagccctgcgattcccggaccgtttaaggtaccggcctcaagtcttgtcggaagctccataggctggttctcaagaaagctgagcacaccggtgccaccgctcttaaacggctttatatctgctctctctcccacataaagtcctccggtaccctgcggtcccatcaaccccttatggcctgtgaagcagagcacatcaatattcatgtcttttacatttatcggaagtacaccggctgtctgcgatgcatcgactataaataaaaggttatgctttcgtgcgatttgccctatcgacttaatatccaccacgttgcctgtgagatttgaagcatgtgtgcagacgatggcttttgtatccggacggattaaagcctctatgtccgatggggaaattatccccctttttattcctacatcactgcatggtacaatatccacacccacgccccgctccctttgcatataaagaggtctgagcacagaattatgctcgagctgtgttgtaatcacatgctcccccggctcaatcagtccgtggattgcaatgtttagtgcctcagtggcatttgccgtaaaaacgagtctggccgcatcatctccgccgaaaaattctgcaaggcacattctggcctcatatattttcctcgacgcatcaagcgatgcatccgatgccccgcgcccggaattgccgcagtgcttcattgcatcaagcactgcatcatataccgcatccggctttttaattgttgtggcagcattgtccaggtaaatcatagtatgtcctcatttacttctcatccaagcaggtaaaaattctttatatagagctcatcatttatatttttgctaagcatatttgcttctgtatgcctcggaaggcttgcgtaaattattgaatcgttatttaatttgcacaatacttcccagcttttcaattcttcaatcattttataatctttaatcctgattatatttttatcattatatacaagtgccgtttttgctttgcctaccgatattattatatcctgtgggaaaacacctatgtgtgatatgtcgtccatactcattgcagtctgttcaagctgctcatcagtgacctcaaatacgctatcccattccacagcaagcaaatgatgcttatcctgccattttacctctgatatattgctgcagcccacaagcagtgcctgctccacagacataggccgcatgaagaaatcttttttgtcacggactgtactcagtacacctctctccatgcttccgatacgctcggccaggcgatacacctcatcgcgattgtgtgacacaaaaacaacaggattgttaaaatctgtcagcatctccataagctctgattccatgcttctttttacatgctcatccagtgccgaaaaaggctcatcgagcagtatgcactccggcttagccgcaagcatgcgaagcattgccacgcgctgcctctgaccaccggagagatgattgggatatgtgtacgccatgccctcaagcccatacctcttcagccagcccttcactttttcctcgtcgcggtgtcccattgctatgcatatattttccatcacggtcattgtcggaaataatgcatagtcctgaaacagatagcctaccctgcgcttacccgggtgcagatttatacgctttttcgaatcatacagcacacggccgtttaatgatataaagcctgaatccggtgtctctatccctgctatgcactttaatgtcatactctttcctgagcccgacattccgattacggacacaacctcgtccgtaagctccatgtcaaccgaaagtatgaaattatccaactgtttttttatttttactatgagcgacattattttttctctttctctttatgcccttgcttttgccgcatatcatatttatcgatacaaggcatgcaaacgaaatcgctatgattactatgcaccagaagcccgctgtggcataatcaccgctttggacgaccattgctatctgctgtgatattgtcgaggtttttcctgctatatttccggcaagcatcgatgtggcaccgtactcaccgatagctctggcaaaggccagcgtaacacccgaaatgatgccgggctttgccatcggcagacgtatcttccagaaaatcttccactcacttatgccgagagtacgcgccgcatatatgacattttcatctatctgctcaaatgccgctctcgcatttctgtacatgagagggagtgcaatgatggttgctgccaccacacagccaagccacgtgtgtactacctgtatccccatgctatggcttaaaaagcttccaaaaggacgccttgtgctgaaaatccttaaaagaatgtatccagccacggtaggcggcagtaccatcggaagtgtcagcagtccatcccagaatgccctcactctgccctttgtgtttatgacaagctcagcaaaagctattcctataaaaaaagaaaaaactgacgctactattcctgtttttaatgttacccaaagcggtgaaaaatcaatctgtcccattattcctttaccgaaaaatgatatttctcaaatactgacattgcctcatctgtctgaaggtatgcgataaattccttcgctgcttcaagctcatctgatgtggtgctgtctccctttaaggctgctatcggatagatgacatcgcctgttaagctgtttggaagcttttctataatatcaagctggttctcgtatccgaatgtatctgagtaataaactgttcctatctcatttgcgccctcagctacggcagatgcaaccgcacctacattggcacagctgtttatttccagaccgtcaagtgcctttgagatatcagaatctgaaatagcctgtggatttgaagcatcaccttcaaccatttttgaatttatcagtgctgctctggtgtactgtcctacaggaactgttccgtcggcaagcgccatatttttagcctttgagatctctgcaaagccggtaactgccgtgccactattcttatatgtaacaaggcatacctgattatttaacaggtcaacacgagtaccgtccaccacgcttcctccgtcgtagccattctgaagctcatccatctgtgccactcctgccgagaaaaagatgttgcacttcgcaccctctttaatctgtgccatcagagttccggagctgtcatagttgttccggaagtttacatttggatgcgccttggtgtaggctgcacaaatttcatccataacaccgtttaagctctttgccgcaaaaattgataaatcgacatctgcatctgctgtatccttttttccacagcctgcaaaaagtcctgctataaggataagtccaaacgcaagtcctgcatatgctttaaattttctctttaagcccttgcgctcctttactgatccgtcagtacctgtcgctattcttaagctcatacttttaacctttcttttcctttatttaaattaaatatgcatgtgattaatattcatattcagcttatcttgatttattaatatatgataatttcatcatccaatctgctccagcagcaccgaaatactgcctccgcacaccatgccctctttctcggcatcgtcagtgttcatgctcacatccatcaggccgcatttgaacacctgcttgcgaaacagtctcctgcaatggcttataacctctgcctccgcacaaccgccgcctatagttccgatgatccgattgtctgagctcacgagcatctgtgttccgactccgcgcggtgcactgccattcttttttatgatggtacacagtatgtacttctcatctgatgcctgtgtatctgtttcctgcttagctgcctcaataagtgcatcaagcacttccttatccacctgtgtgcagccggtacgctcatttttgcactttactatctcacttatcaccgaaagcgcaatttcctccggtgtctgtccacctattgcaaggcctatcggagaatgtaatccggatatggtttcctgtgaaaatcccgattcttcaaggtctttttttactatggcagctcttttctttgagcccatcatccccacataggcgtatggctttctgaatatctctgtaagacactccatatcaaagcgatggcctcttgtcatgcatacatagtaatcatccgcctgtggctccagcctggcgagagtttttttataatcgccgcaaattacatggtctgctccttggcgctttgcattatcggcaaacagaggtctgtcctctatcacccatatgtcaaaggccaaaagcgatgccatgcgtacaagtgccgccgatacatgacctcctccgcagattatgaggcgtggtctgctgcctatctgctgtttaaacatcacaatggaattatcattgtcatttatttcatctgcccatgcactgcctgatgccactcttattctgccatctatataaagcgccttttcaccggcatgtgctccttctatgactgtcaacagctcacagcggctgtccgccggtctgtcctttatcgaagcatatatgtttgccggaatcagcttcacctcgtcaccggtatgaatctgaccgcctcttatgactactgcaaacacgccctcctttggcataatgcactcgcccatcctcttgtagatagcacaatgcgaatgacactgtttgcctatctgcgtcatctccagaatggcatctcctatgcaaaagcgtgttccaagcggtaaattcttgaaatcaaatcctgatataactaaattttcgccaaatgcgccgttgtctatctgcgctcctcttgccctgaaggcatatattttctccgctgaaagcaggctgacctgcctgtgccactttccggcatgtgcatctcccatgatgccatagtccgcaacaagctctgcctgtggcacctctctcttttcagttcctctctctttgcttatattgattgcaagaagctttcccatgatttgctatcagcctcctatccggctcatatttcttgctgcatttacttccgcagctttcagctctgtagtctttgtctccacagtctttgtctctgtagtttttgtatatgtcactgcattatcattaaaattgtgacaccccggctttgcctttatggcagcctttagtgcctgaactattacaaaatctttttccaaatcatctgtaaattcgcatgaatcaggtactaaatccattgtcacgctgcttcccaggcatggcataagcctgccgtcagccgtaacacgtatgcggttacaggtatcgcagaacttcccatggattgcctgaatcagccctactctgatatcaagtccatgaaaactgtaatactctgccggaccgttatccgcattattatatcccgaattaatttcttctctattttcagtatctatatggcaaaaagttccatatacttctaaaagtgcgccaataaccttctcatacggctcaactccgttggtatgcccttcacctaccggcatcatctctataaaacggatatctgtacctttttttgaagcataccgtgtgagagccaccacatctgtctgcggtgtgagcactgcattgattttcactcttattccacactctatggcggcatcgattccctgctccactttatgaagcagcggtttttttgtgatatgttcatattctgacgcatctatcgtgtccaggctcacatttatactgtctatgccggcttccttaagctgctttgcatgctgcgcaagcaatactgcgtttgtggtgagtgatacactcctgacaccgggtatctttttgatttgtgaaaccatctcatcaatctgcggatgcagaagcggctcaccgcctgtcagacgaaaatgcgtgattccaagccttgtggctgcgcggactatgcaaaacaccttttttacgctaagtgtatttattgcctgacactttttatcattgtcctgtgggttgcaataataacagttcagattacagctatctatcaccgatatgcgcatgtagtcaatctctctgccaaatctatcgcgcatattaaaagcccttcccgaaaccgcagttaggaaacgtacagacatcacaattcaggcagagtccgccttctccaagtccggcaagctcatctgccaaaatcatatcacacgccataagcctcggcaatacaatatcaaatatcgtgcgcttgttatacatggcgcagccaggcagtccacatatcggcaccagcctgtcacctgcatcatagtacgacagcaaaaacatggctcccggcagcaccggtgaaccgtacgacacgatccgcgcgcctgtattttttatggcaagcggtgttttatcatcaggatccacgctcattcctcctgtgcagaatacaatctccgctcctgcctctattgcacgtaagcatccgtctgttattttttggtcatcatcatcaaacacctcatgaaacatcatctgtgcaccaaactctgctatttttttctcgatgacaggggtaaacgcatcctgtatcctgccgtggtacacttcgtttccggttgtgattattgctgcttttctgaccacaaacggctttatatcaagaatcggtccgtcatcgcatatgtgtgaagccgcctctagcttatccttttttataacaagcggtatgattcttgttccggcgagcttatccccctttttcacagtggtattgccgtgcctcgtggctatcatcatttcaccaaaggagttgacctttttcagcttttcgctgtccaccttaagcagtccgtcacagtcagcaatcacctctatcttaccttcctttacaggggatggatgcattttacttgtggtgccaccaaaaatgccggattctgcggcttcacaatgatgttcgacgtcggtctcattgctatttgtgccacatgcgctcatgcgataaagcatctctgctgcctcattttcgtgcatcatggtctcatcattttcccatatatatatggtgtcttttccgacgctaagcagcaccggtatatcctcttttgttataatatgccccttgcgaaaaaccgcatcctttttcacaccggggataatctgtgtgatatcgtggcagagcacctgtccgactgcctccgttgtcttcataagcttcatataatcccacactccaaatattatttttgtaaatagttactgtcctaaaccataccccgtgcatttctgtcaccggccgcactcactgtcatactgcagtaaaatatcaagtccatgctctatatttcccatcagaaaatccatgctctccgacactgccttcacactgccgggcagattgactatcagtgtgtttttcctgataactgaaactcctctgccaagcatggctttaggtgtaagactcatgctgtacgctctcagtgcctcagcgatacccggtgcattacgctctgcaatatccattgtagcttccggtgtgatatctctcggtgaaaaaccggtacctccggttgtaagcaccagattgcatttcacatcatcacacagcctgacaagctcgtctgcaatctgctccctctcatccggtatgattttatatgaaaccacatcatacttatctttgggaagcagttcctttattttcggaccgcttttatcctctctttggcccgctgcgcctttatcgcttatcgttataatccctacagtatacattacatcaccctgttatccttgattaattgtgtatttttaacttctcagcattttaaatgagctgtaatcgttgccggtcacattgttaattgtgaacagcaacgtaatgcccgctcttgccaccggatttttccagcagatgtatctgcccgatctccatgccacggtccagtgccttacacatatcatatatggtaagaagcgccacactgacccctgtcatggcctccatctctacaccggttttgcccacacaggctgtcgtgcagattgccgtgatactgctgtttttttcatccagctcaaactcaacatcacacttcgtcatggcaatagcatgacaaagcggaatgagcatggaattgttctttgcacccatgattcctgcaattctcgctactgccagcacatctccctttttagctgtgcccgtagataccgccctgtatacggcgccatttacctttatcgtgccacaggccttcgccacgcggtatgtgtcatcctttgcatgcacatccaccatatgagcttcccctgcctcgttaaaatgtgtgagctttcctttattttgtttctgattattgatatctaattcgttttcctgcgtcaatctatttatcctcactgtaactattcagaaccactaaaacaccttaatagttaccctcatttattatttaataaatctttacgccgtgctcaaatgccgataccgcctcaagcacactgcctgctatactccttgccttgtcagagattgtaaagcaatttgttatctcactctcgcgcgggtcgatatccgctatcttgaagcctttcctgaaataataaccctcacggataaggcctcgtatgatgcctgtaattgtagcattcacagggacatattcagacaatgcattgtcatagctttctttatccggatatatccgcgctatctcatcgcccttttgcacgatgtctccgatttttctgacgtcatgaatatatcctgccgccggagcgtgaatcacacgctcacttgtgaagccggcgatatttcccggaacacctgtgttgggctgtgccatgccatcggtaatgatgcgcgccagattgtgcccacgcatggactcaatcaccagatgcacgtcttgccctgccgtaaagcccgggcctactcctatcacaagtgatgccatattgattgtggtacccagatttttctttgctattatggcatctaccacaacatccggctttaaaagtgcaattgactcacccttttggtctataagaagcgggacctctccggcttcaagcacagcttcgatggctgaactatcccacttttctgatataatatgagctgccggtgtgtcatttatccctgaatatgtctctgtatcagtcaaggcaggaacaagtctggctgtcacaccctctacagctgcgctcccatcatacactgcttcgcaaaaggacacctggcgccgtatggcagccggatagtctgtctcaagcgctatcaccctatgccctgcccggtgcagtctgtggatgatgccggtcgcaaggtctcctgcaccgcggcatatgattaacaaatttttctttattatctgattattgctctgattcatgctcatctgattaattaccctgttaccttattatttccatatttgcaactattcagaaccacccacgctcattcgcaaaaacgcacgatacccgtccttcaaacccgctatcacgcagctttctgacatagacctgccgcagcgtatctataaccgaatcatcaaccactgcatcctctgccgttccaagctccttttgcataagctcatatcgaaatacaacgtccttacatgacctgcccttttcccatgtgccaagcactatgataacatctgtggtacccggatatatgacaggctcatccgctgccggatatttgagggaatggtgctttgccccatctgcttcgattataacataatctaacgcctgtggcatgtctttaatcagtttatcgagcaaatcatacggcagtccgcacatctttgactttgactgttctgatattttctgttcagatattttctgccccgccatacaatatccagcttttattattttatcccttaacgcaaaaaaatcgcaggataggtcagtgtcagcttcgacatacatgtgcgttgttgttgtgacaagcacaccttttccactcctgtgatattcccttgcaagcttatgaacgagtgtggtcttgccacctgcgcccactattgaaatcactttttccatatatttccatactttcccacaatcgagtaggaggcggtgactaaccgccgtcctctcacagcaccgtacgtaccgttcggtatacggcgctttcaatagttaacgtgcacagactgataggctgtggctaaatcataaaagccactgtttatcagtctttctttattcagcgcccaaatcacagctttgttattgctgatataccaatactttctgcgactgtttgctattgttgacgcatagtgttctgggattccaagtttgactagatttttatatttcgttctaggtttcttccactgtttccatatgcacatgcgtattctgtgatagagccatccgttgatgtcatctatgttgctcttcatgcttgcaattccgtagtagttaagccatccccttgcatacaccttgattttctcaaggcttggcttgattgactgacatcgcttacgggaagataactccttcaatctggacttaaacttcttccatgacttcggatgaactcggacataagtgcctttcccgttccttcccaatgcaaagccaaggaatttaaaatttcggattgcaaacacgctgacagtacggctcttttctcggttgactgtaagtttcagcctcttctcaagatattttgtactgctttccaagagtctctctgatgctcgtccgctctttgcaagaagcacgatgtcatctgcatatcttatgcatggaacacctcttttcaggaactcctggtcgaactcattgaggtagacatttgccagcaatggtgatagatttccaccttgtggtgagccttcctctgtgtcaatgaccactccgttttccattacaccgcttttcagatagcgctttatcaactgtactacacgttcatcttttacattcttccggagaagattgatgagaatttcgtgattaagagtatcgaagtactttgacaagtcaaggactacagcgaatgtatagccttgttctgcatactccttaaccttaagtattgcatcttttgcacttctgttcggacgatagccatagctaccatctgcaaacagcggttcatagattggcactaactgttgggttattgcctgttgaagtgtacggtctatcactgttggtatgccaagctttcgcacaccaccatctggtttgggaatttcaactcgtcttactggagacggagtatactttccacgataaatgcggtcagttatctcttgttgatgttcctttagatatggaagagcctcttcaatggtcatgccatcaattcccggcgctcccttgtttgccttaactctcttatacgctctgttaaagttgtctttatacagtatcgtttccaaaagtctcggctgtgcactgtctctttctttccatatccgattgaatgacctggacgctttcacatacccttcatgttccgcattatctctttgcgaacagccattgttttcaatgttttctgccatagacggtcattcctcctttctcggtcatactcaagactcctactgattcggtccttcacctctcggctactatgacctctgctgacttctatgcgttcagcattgctttatgcaatggttacctctttcaaggcataccgcacagacctccctaggtaccacacgtttcttcctctccatccatctgcctcatttatcatgcatgattccgtgtagttattgggctttaacatgggttgctgtcttacccacatgcatgacctcatatgagatttctgttcgtcagaccagagatttgcccgtgagttggtatattcctcacatccagcttccttcagattccatctcacgatggacacccttgccttcggctatatccttcccactaccgggcggattcgggactttaacccgttagaaacgtgcgccgctaggcgcacaacaataaagccgccggtgtacttaatgcaccggacggcttcaaaatcctaagcgttagtcatccacacgcttcacatcgtctttctcgtccatatcccacatatatggcgcgttctttgacttcttcggcaaaataatattgagaagaatagcgcaaagtgagcaaggcacgatacctgaaccgccaaatataagctgtacatagtatggcagatgtgatgtagcaccggttgtagcgccaagtccgtagcctaaaccgattgctactgagataattgtaatctcacggctgccgattggctcctttgtgatgagctcaattcccgaaatcaggatagaagcaaacatcataacagcagctccgccgagcactgactgaggcatgattgacatgagagctccaatctttgggcagaagccgcaaataacgaggaatatagctcccattgaaatagcaaatctattgacaacctttgtcattgaaacaagacctacattctgtgagaatgaggtatttggcagtactccgaaaagcgctgcaaatgatgaaccaagaccatcacagataacaccgcctgaaagctctgaatctgtagcctctctgtccattccaccctccacacaggctgagatatcgccaactgtctcgattgcagtaacgataaacatgatgccgattgggatgattgcattggcatggaaggaaattcccacatctgacagctttccaaagcctataaagcttggaactgctatccatgccgcatttttaacctcatcaaagtttacaacccatgagtatgtgtatttaacaccgtcagcggtcacacctgtgtgtgacatggtaagtgtcataatgattgctacaacatatcctgccaggataccaaaaaggatggcagatgatgaaaaaatactgcgcgatggtgcaaaatgcttaagaagcacgattactataagtacaaccattccaataaaaaggtttggcagtgagccgtaatcatttttgcctgttccaccacagaagtagttgattcccactccaaggagtgaaagtccgattgctataacaactgagcctgtaacgattgccgggaaaaacttgcgcaaaggctttaagaaggctccgagtatgccctcgaagatacctcctacaaggcaggctcccataatagcaccatatgctataactccgccgccacacgctgcaactgtattatttaatactccaagaaagcccgaagaggttcccataacgataggtacctttccgccgacaggtccgatggaaaacatctgtactaatgttacaatacctgcgataatcattgcattctgtaagagagcagttctaagctccgcaaagccagcgtccgctgtgagcccgcatgctcccataacaatgataagaggtgtaaggtttccgatgaacatagccataacatgctgcagtccaagcggaatagcctgagacagaggtattctgccctcaaactggtaaggtgaagagttcgttgtctttttcattggttcctccaaataattatactcttaatttaataaaaaatttacaaaattattttacgagcataaggctatgtggtcaatttagtattacttataatataatgtccatttacttataaataaatgctattgaaattagtttctgacaacaacagggcacaccacaaccggtatgccctatttatataatctaaatttgggtattcaaactttttgatgggcagtctttgtgagggtgtaacttgagggtttggcttgagggggctggtttgaggggttttcgtgagggtttgacttatgatgaattaaataaaaaacagggttagtcattattacaatgattaattctgtttcttttttatccttcttttcgtatgatattttttgcggaaatctcaaacagaaggaggatacatgaatagtatttcgccattgcttggatccaatagcaaagccttggaaaatgcatcaacagcattatcatactcaccccctacttgcataggcatttcctaaatccatatatacatctgaattttgctcaatctcaattgatttagaaaaaagctctacagctttatcaaatttttcaattcccatcattgcaaaaccttgcatcttataatcaagtgcttgttcgttcaatttgcatacctcctcgttaaatagtgttattaaaaacagaataagaatttagttctttgacctctacatttataccttttgatttcaatgttcctatcaaagatggctcgaagtaatcataaaatattgcttcatacccattaagtggccattcgcgatctacaatttgttttctcacatctgaataattgcagcctgttccatctgccaaaaattctattcgtctcgacttctcgtcatatttaacatttctaatagaactaaacggcattacaaatgcgtatcctgttgaatcagcatttcttgaatttaatcctgccgcaaatgccacttgctgaaagtgatataacgcattctcatccatccatagtttttcattaaggcggtcttgtatccaatgagaagcaagatttttcacaacagtacttaatattattgctataataaaagtcacaacaaatataattccaaatatttgtaatttttcataatcattattagaaatcacaaatatacctacgcaaaacgaaacaatggagacaatacataatacggttgtcacaactctaggaataatccattttttttctttacgaatcctattttttctagccttttttttattcttttttgtaatattaaaattcataagttatgctccttttttaatttgcgaccaatagatcccatgctttttctgtctttttacccaaatctccaaaagcatacaccttttctttgttaggatcatatttaataatatatttatatacctggctaacaaaataattcttctttaccaaactagatattgtgatatttctttgtgtatcatcatctgcctttaaatatgtagaagtatctgatattttagaagcagtattcttgacaaatgtgagtctctttttcaaatttgaatccgatgcagcttttgcagccgctacactctttgcgcttgatgatgcagttgtataatcaatcacagttctactagcagatgcatgattactgtatgcagccatcttacattccagttgcatttcatacactctgtttcgtaaaaaaatcgttcaaacgcatcatttaaaaccataatttctcgaatgtgtgaaaaagacacgttattaactaaaacatgtggatctgtgacaaattcgttcgacactgtcgaactttttccaaaatctggtaatttaaattcgcatagatacagtataccacaggtcctgtatctatgcgatttcttttttattgtttttgccgataagtactcatcttctacacagtaacctccggatagaaataagtaagaataagaagtatcacactgtagcagataattcaaaatcaatgtacgatatatttggagaaaaatataagaacaaaggagatcatactatgaacaatttacagaaccacattgaaaactatttagattattgcagaacacaaaagtgcttagacaaaaagacattaaaagcataccgtatagatttacggcaattttctgaacagatttccgtaaccgaagcctcagatcttacttctgccacattagaaacatatgttgcaaaacttcatcaacagtatgcacccaaaactgtaaaacgaaaaattgcttctttaaaagctctttttcattatctcgaatataaagaaataattaaccagaatccgttcaacaaattgcaaataagatttcgggaaccaatcatactacccaaaacaattcctttacataccattgaggtattactaaatacgatatatgagcaataccacaatgcctctagcaactacagaataaagacctcgctccgggatatagctgttattgaactgcttttcgcaacaggaattagaatctccgaactttgtacaataccataccagaatatagacctgcaaaacaatattattgtgattaaaggaaaaggagccaaagaacgcctaattcatatatgtgataagaatgtcattactgcactgaacaaataccattctgaatacgacgctgaaattcactcatgcggatatttctttgtaaacaatatcggaaaccgcttatctgagcagtccgcaagagaaatgatcaacaaatattgtcacattgcagatatccagcagcatattactcctcatatgttccggcattcttttgccacacttcttttagaagaaaatgttgacatccgttatattcaaaccatgctaggacacagttcaataaatgtgacagaaatatatacacatgttactatgtcaaaacagaaagatattcttgagtcaaagcacccccgtaaaaacatgaacatatcaaatcaattatagtagtttcaacagtcttgaagaatacctacttcaagactgttttattggctggactacatttataatcccagtatctatcttattgcaccattctttgtcatatattgtgtctaaatacctttctcccctatccggaaaaattccaactatttttctgggctctaaatcatttgaataacctgtataattttgaatggcataagctactgcccctcttgaggcacctacaacaatcccctttgttaacagtttattgcactctgatatggcatccacttcctcaataatcatataatcatcatatttagcatgtaccaaattttgtggaattagcccagttccgatacctgaaatatgcttcttccggttgctttgttcaaaaatttgcgaaccgactatatcaaccgcaacaattttacaatttggaaattgttcttttattttttgagatgtacctgccaaagttccacaagtactaactgcaacaaataaataatcaatcttttccatttcattacacagttcttctcccaaagaaaaatatgccttccaaacatattcattttcatactggtttgtccagtatgcatttgtatgatttgtaacatattctttgacagtctgtattctatcctgcacatagtttccatttttgtccgccttacgagcgacaacaatctcagcccctaataattcgatgattttcctatttaactctgttatgttgggatcaaccacgcatataaaagaattgccttttattttgcacattccagccaaagcaattccaaagtttcccgatgatgattctataataactgtatcattttttattattccatcattatatgcgttttccattaagtatcttgctgccctatctttaacactgccaaacaaattactgccttctatttttgcataatactctatattatcgtctatttttagtaatggcgtattgccaatcatatctgtaatattttgtactctcatataatcctccgaggataataagaaattatcctatgtttactatactacacggaaaaggaacattcaatgatgaaaacgattatttggcaacaaagtgatgtgattgtagatagagaagttgaatctgatgagattgttaaaattattagtcaaaattgggataaaaaaactgttcattatatttgttcagaaacagctatcggaaaaacctctctgattactaaagtaattgaaaaatatgataaagatgattgtgatattatcagaataaaaacaaaaccgtgtaatgatgatagtggagacactgcgtggtattatttacaggaattatttgatggtattacaaaatattttgaaaaattggaagaagaaaatggctacgctttaacatttgacaatttcctgaatgagtataatgatgctagtgtaaaccgtactcgtttagcgtctggtttggaaacattgtttggttcagattcaaagaaaggattgtttaaaaatgtttgttatctggcattgaagaaaattttaaaattaaatgaatattctactgatcaattgaagaatgatacttctgtagattctgttcttgtgaaaataaattatataaatcatgttttaaaaaatagaaaagttttattgataatagacaactttcaaaatattgataaccagtcattaggttgctttagggattggataaatgatgtcgattcaagcacttattttatattagaatttacacatacccccaactcagacaaatttgataaacaaagagattattttgctggattaggtgcaaaagttattaaaacagaattagagccaattgacaagacatatattatagatatcgttcatagaaatgtaaaaaatttatctgatgacatggcatttaatataaatgttataaatcattatgaggaagtgtctttgggaaatttaagagaattgatagattattctgtaacatatgaacatcccgatgatgccagtgagaatgaaagcaacgatatcgagaatggcacttatcagattttacataatataaacaatcaggaaacacttgctatgttaagtctgataatatttcatcaaggaaagataacaagaaaacatgctgaaacgattttgttcccggaacttgatatttcaaacgcaatacgtgaactgttggaattaaatctgattgaagaaacagatgcttattatgagctaaaacatgcaagtatcattgatcaatgggaaaagcatatggatgaatttcaacaaattaatacagttgtttatggacggacaaaaaaatactacctgggatatttggaaagttctaatattagtgagagcaatgaagcatggattagactattatatttgtactctaaagttgagccatttgaaataaaaaaattgcttccacaattagaaagccaaattataatatcaatttccccagaagattcatgggattatattaaacagttatatgacattatcaaggaagatatactgaaaaataaggcagtaatctttagactacttgaaatatgttataaattggaattatatgctaatggctatgaaatattatgttatttagagaattccggtcagctttccgaaagtaaattactttttctacataaactgctgtatctttcagcattggatcagcatgaaactgttgttgaattatttgagaatataaagcctgaaatatctcttgaatcacgtattggattaaacatgatgctagcttgtttgagtagttacaggtatacggggcaaattacagagtgcttgaaaatacacaaaaaaattctggctactcctatatacaaaacatatgatgaatatgcaatttttcttagattaacaaatatctatttgcctaataaaaaggctttaaaatatgctaagcaaagtgtagaattgcttgataagcattataacgtataccaaaaaggaaaatcgcagattacttatgcaaaactattggctggattaggaaaaaatgacaaagctttaaatgttttaaggaaagctgaggaatcattaaagaatcatgcaatacgtggaaatattttatggattgatgaagcagatatattaatggatcaaggaattcatgacgattatgtatgggatttactgcaaaaatctgaatttacagctgttataccatatgacaaacttgcaataattatagttaaacttgcatggtgttatgaaaatgaccaatttgcaaaagcaaatcttttaatagaaagaggtcaaaatctaattccattagagcccgatcatcatatacatgctttgttttattacaatgcatatgctgtattgaataaatctggtgaaacagagagaagtcaaatttattataaaaaagcatatgcattaaaagaacatagtcgctacataaaagcacgtatagatgaacctaaaacaaaagaagaaaaaaatcgtataaaacacccgtggtatataatctacttatcattctggaaccacgatattgaaaatattagtgaataagcataaaatgcttattcactaatatagggatatataagttcttctaaatagcgtgtcacaatagaatcccaacagacatatttcatataataatccatgtcgtgtaatgtttcatttagcacgaaatgctccagataggtttctatataattgaaagaagctattattgagaatatacctgatccggcaaagcgtacatttaattcgataaaatagtactccccattattaactttaaagtctaaattacaaaatccaggtaatttatataaattacagatattctttgtgattgcaataattgtctcatcataaacaatttgacttctaaaagctgtgccatctttaatctcaatagtttttcgagggattattaatttgggaacaccttctttatcagaaaaaacatcaacaattacagtatctccttctatataaggctgcacaaaataatcaggatgaaaatgattttctatatattcagctttttctaagtctacaatatatattccgagactgtttacagaatttctcttacgaaaaatcactttcttctcattaaacagattatcgcaaatacggggaacctttatgttatttttcattaactcctgtgttgctttgagtttgtccttaaacaaagctactgtttcataatcggctaaaaagaattttgtttttacttgattaatatatttggaaagtaataccgcttctgcatctgaagcaggtattagcaggtcaacgttttctttttcatttacatcgtttaagaaattgatatattccgcctcctgtgttataggtggtgcctgataatatttatcaacaagcagacttcccgcacactccccttttttgtaaatatcagaaccaataactataatatcgtatttttcaattcgacttaatgctttaataattgataatgaatttgtactatgtatattgttgatttgtatgttcatctaatcttcctccgaggataatttcttattatctattactgattgtatcatatatcgcatctaaattcattaattctctgaccaaataatgaataccttaaaatgaatttctaaattccaccgcccattttatactttttatacttttttattcaaacgctttttcattattcttattgactccctctgctcctgtgttagcccgtcattatttttcgcttttccaaacaatatataatctgctgatatgtccagcatctgacatataataaacaattttggcaagtcacattttacttcaccgcgttcaatcctcgaataactattggctgttatatcaagatacgctgccatatcaggttctgacagttcattctctattctcttgtattctctgtccaatctttaattgcacatttttattatattcttccgcttctatatacatattgtccagcctttcaaacttgttaccgttaactcgtttgagaagggacaataactccctagatatgtaattttcggcaaataaaataggacacatgaaaacagtcccagtcctcatactggtttctaatttttcatgcgtccttaggatggcacggcctcaatcttatctcctttaaggtacatgatgtttccgatatcaaaaagaaccgtcgatgacttctcctcaagcattaatgccttcttgaagttctcaagagcgtcatcatatttttctaagcacgaatatacgttgcctaagttaacatagcagtcaatatacttaggcgagtctttttatgcaagcaaaaactttgctaaagcttgctcatattgctgttgcaccattaaggcacaaccttgatttattaaatcaagagaattttcacttacattttgcatttctctttcctccacattaacagttttcatccaatagttgcttcacgctaaaatcatacacatcaagaagtgatatctcattgtattcatcggatgtttttaattcgccgttttcataggtatcgccgatgatttttccatataaggtaagaatttttgtcttatcgtcgtattcatacttgctaatattctcatagagaacattaaaggcgaaaatagcatcagagagaccaacacgatcgtcgtgataactgtagacgaagccaccatttgcgaaggtaattgtttctcttcttctcagtcgatattcaccgcctgcggaaataatgtaaacaattgctgataataatgataggccatatggaaagccaaatgtcataatcagaaaaatgatatcggcaacattactactaactattctcaacgataacctgtatcggagaatgtttttctatttcggttttgaaatccacatcaattgcaaacttggtgttgaaataaagtaatcctgcagtacaatttctcacctgagtaggtgtttggggaattgttccatccgccttatagttataccaggtggaggttccttttccatacaaatgaatacgctgagatttgcttttgtatacacacttagtaatctctgaatacttcatttggttgatttccattcgcgtaacatgtttactatagtatcttttgggcaaatacagtaccaaatggtcttcaaaaaactgcaattccataggtgaaggaacatattcttttttccctccaaggaaagtaacacctaatgccaacacaaacaaaagaacacgtgctgtccatgacagttctgaaaacaaattgtcttgaaacaacagagaccccaaaacaatcacagctacaacaatccaaacacctgttttcaagaatgtaatacccctgctttggtttgttggaatcaatacagcttcgtttgtttgaattacataatttggtctattcattttacacctcctacgctgcacgtaatacgggcatttctatatttggaatataaacttcaggtatagaaatgttgatattacatagccttggtgtttactccaacttcacacattctggttgtaaaagtatgtctcaaagaatgattgataaaatttgtaagattggctgcattgtctcggtgaactttatcaagtacctctaaattacagtctctaataattcttctaagagctttattaagtgttccttgatgctgaacattaccgaatggatttacaaatataaaatttcgataaccatcgacaacagccacgcttttgaactttcacctttgaaaaaatatttgaaaaccttacaaactctctctagcaatttttacaattgcttacagcgcatagcctaaccccaggaataattgactgtcaacggacgcttatgtcctttttctcattatattggatttttagcttgaataatcgatactattgcattatgaaaaagtcattagaaatcaacaaaatgaaagaaaagaggcggtacacgaaacagctcatttctttttttgtgtagatcttgacatatcaaacttatttctcaaataatcaaatattacaatgtaatttttcatttcattcttgatatcacaaataataaccgatatcttgctgaatatccattctctgcttgctgaatattcttgcatcaaaaaactttgattccagcaacatccccgacacgggaaccacctttgattggcttgattacctataaaaaagaaatagagccaatgtcaatcccagagccgctttgcaggggcgttagccggctttttattggtgagatttcttatattctacatacttgccaatcattttcctaattacctgacagcatggacatccaagccagaatattcacttgcagtgttttttcattctttcatctacggtcataatgggtataatttctaaatgcacctcacatctcgcttactaaaaaacacaaacatatccgctatcccaacatgtcacaaatgttttcttatatttatcaaatataataacggtattaccataattaaactgtagtaattttctaaccatatttcaataatcatcgcaattataatgcatattatacctattgtaataatttttcttctcatttatgttccaccctctctaagattagcgccccactgataatcaactccatggggcgctattttgattattacaaatctacaaatacaattagtttcctgctaattgctcgtcgatttcaataatcttttccatacactgattgatataatctctgaaattaccaacagcttctggtacagtggtagtgagaagagtctggtactcttcctcataggtagagcgcgcattatcgtaagctgcgccttcccaataattaggaagttcgtccattgaagaattaatttctgttgctgcagatgttaactgctcgatagcagaattaatcttctttacacactcctcaattccacctctttcaactcttgttgccatatttgttacctccttaatgtggttaatttatgtaaacccactatgggattacattagtacttagtaaaatttaattttgtctacctcgtcttctactttttcatattgagtagccgcttcttctaaaagttcttctaccgcaccaattatttttatgtaattttcaacttctttagtccagtcggtatccacattctgcataaaatttttaccagcagctgtattccaatctttttttaatttatccaatgactgtataactttatctttatacgtatttagatcatctgcgctgtctgataaactttttttcatatcatttattttttcaatatcaaactttagttctttctgtttcatacaatccctcctctactgaatatcaagattaggattcattgattttgccaaatctctttctttttttgcctcttcactatttcccatttctttaaaaatgaaatatctaaatgcatgagcatcagccttttctggatacaaattttctatatactctgctaagtccaaagccttatcatattccttaattttcacatgactcaataatctatataaatacccctcatagaatgatggatcatttattgtagctttacgcattttaatagtaatatttttaaattccttttctgcttctgaaacatttccagtagcctcaagagctgtagcatggaaaaataatgccgtcgaataataaaatataccatattcttcattcattaatttagctgaatatgttaataacttttcattctgagcagttttaccataaatatctacaattaaatataacaaatcagggtcgtctcccacctgattattagcttctaataaaaccttacatgcattttcaattttattttcttttattaataatgtcgcttcatttattgatgcgtcttttatcacattagaaaataatccttctgacttcatgtaatcaatccatttatgtgcttctgcatctaaatttgattgaattaatatctttaatttgatatttgctaaattataatcctttgggaatctactacatcctttgttaattacctcgagagcttccgtatatctttcctgccccaaaaggatctgtgattttacatcataaatatcaaatgaatcaggcaataccttctccatttcatctaaagattccaatgcctgttcaaatctattaaacgctaaatatatttttgtttttagaagtcttaattcaccattaaatggatctaaattaattgctctactaatatttcttaacgcctgcggctcatcttctgcctcaaaaaatatacttgccattatttgatacatttgagaagatacaaatccattttcttcagccttattatagaactccacagccttgactttttcattcatcagcacataaatacttccgatagaaaaataagcttcagcgtaattaggatccactaataacgcttttttaaatgcttcaattgcttcactgtattgctctaaatttgcacatgcattccctaaatgaatatatgcttccaatgttctaggtgcctcactaattatttcttcaaatactttctttgcggcatcatatttttcagcagaaataagcataattccctgactcactttgtcatttatcatttcagtatccataaaaacatccttcctattctgtcaagcccaaatctattgattttactggctttgacgtattttatttaccactaaaacagagccgatagtgatgaatatcgtagtatcttgtaccgaatagcttaaatatgggtatcactttaaaagcatccattctgtttgctttataaaggctattttccctctgctaaactatgatgatgaaccttccgtgtctaaggggatcgtatcccaacttccttcgtcccatctatccatacaccgagtgccagccaagctcctagacggggtcgtgccccatggtgaaaaccgatgccggctacagctcttgtttttatttgattagttaccgacctgccttcgctcataacggtactgattaattcagtggacgcgataccgctttttactcagttggtcttgatatggatgcagttctgtctcaaactccatcatttacgggtttcctatccagaaccctgcccagcctctggtctgccagaagctcggtaaggctctggaaatgtattgctttcttttctatgcagctgcctgcactgtattgccctgtggatatctgatatccctcagcattctctccgggtcatatttcatcccagtgttcagaatcgtataaatgactctgagaatcttgcaggctatcacaacaagtgactgcagctttttcagcggattcatgcttcttgtcgtataatacgcatgcagctgtttgaattcaacggcatgtgccactgctgattttgcagcctgaaacagccagtatcgtagtctcttgcgtcctctgtgactgatttttgtctgtcccttatgcttgccggaactgcaggctacaagccccattccactcagcttctgtatttcctttacatcatcaaatctgctgatatctcccatctccgcaagaattcctgcaaggatgttttcgccaactccgttgatttccaggatattttctgcatgtggtatttccatgcatttctgatgcagtacattttcaatctccgccagttgttcatccaactgtatgatttgttctacaaaccatttgatggattctcttccggcatctgttcctccggtcagccctacgcttttctttgcatagtctacgattactctggctctgctatagcctcgtccacgaagctttgcttcatgccaaaggcttttcagcccttcttcatccaactccacgatatcagatggtatcggagccaccttcagaatctccagtgtaaatgctccatcaatctttccaaaagcgtccatatattccggaaagtaaatcttcatttcacgatggagacggttgatatttctgattctgtcctcggtaagctgatccctaaacatggagagccttctcatgtctgcataaatatcctctgggagataaggcattccatagtttccatcttttacaaggttggcaattattttaggatcttttctgtcatccttgagctggctgttatcttcaatctctttgctctgctttacagcatatggatttacctgaacaacgctgattccatttgaaaccatccatgcagcgattgcaaaccagtagtgacctgttggttcaagacccagtactatctgttttttatcattctttgctgcaagtttcaacacccatgcctttgcactggcaaagccttcggatgaattactgaattcaaaagctcctttgctgagttcttttcctctggtgtcaattgctctgatataatgagtttcactgcctatatcgcatccaacaataagcatctcttcagagatgaaagagagtttgtcattcttctcaaatttgccttttgtttccagctcacgccatgttgaagccttaagttcctgttcaatcacctgtactttctttttaatttcatcctgtgataaaacatttatcactgatttctttgataatggttgtacttttgccttttttgctttaatattcattttagatacctcttgtgtttttagatttcttaccaaccggccaagtcagtaataatctaaatttacttgaggtattctttttggtcaatcccttttactctttaaagtatacaggaagctcctagttaatctttgattttaatacctcgtacaatgaaggtgtaaaataatcatttatctttatattactatccaccatctcagttatatttattttgtgaatatcagtagatgtattaacaattttctcaaccatcattccatcaatgcttatttcgaacagcttatcgtcataactcaaattatttattctgttcaagtcaatcacaacaatatttcttttatctgcaggtgtttgatattttattctaaatatgtaaaataatttatcatcaacaatttctatcatctcatcaatacgaccacctataaacgtgtgttcaagtcgtattctaagtacatagataaataatacagcagccaaacccatcgacccaaaagtagatgtaagcatagcgactaaaaaatagctaagttctccagttctcatatttgtcgaaacaaattcacctgttgccacgcaatagattggaaataatactatataagcaataaccaaagcaaaagaaattttttcaaaaagccacaaataataaatgcctcttctatgtttacgattctctatttgaattttcttttttagtacactgtcaaccaaaatattcatattaacctccaatcaaaccaacaacatcttcaattgtctttacagtctttgttccatatttatcaaaaattgaaaaggctttcgaatttttcccaattccagtaacatttttcagagcttttattgaaccaccaaagctcttatctgactctgtataaaaatcatataatccatcaacattcttcaagaaattcattgtgttatctgtcgttttcgtaacattaaagaacttcaccagcttttcaggaatactataggtctccttactaaaattgaatgtaagttttcctaattcgaatttcttatctttaaaatatacagaatacttactaaccctatcagaagatgtaagttttattttaaaagaaccatccttgaatttgcctgtagtcgcagttcttcccatgtcatgcaatatatttctttttatgtttgaccatgtaaagctataacctttataccatttatcaccattatatctaaaattaatgttatcgtttctggttgtcaccctatagtcttttacgtttcccaaacttgcaatattacaaacaaatgctgttgtatctgctacaacctttgtagtatctataacttttcctgcttttttaactccttcatttgtatctttatcgccccaatcaaccttttcaaaagcctcactcattttacttgcactaccataatatctagcagctcctggatttccatcatcatcatcaaaaggattgccactcaatgtcaatgcctttccattagtataaatagttgctagtgaatttcctatagttatgattgcacctatagatgttgctagtgcccctatacaaccgataacaagaggtatcgataacccacctgaaaatggtatggcacaaatcgctgctattgtacctgctgcagcaactactattcctacaagagcggttgttattttccaaacatattttccatcaccatatttgaaccaatcatgcactttgtctaaaacatttcctactttgtcacctacccacttcatgccatcaacaaaatccctgactaaagaaaaatgattagccaaatcaacgcaaaatgtattataaatccaatcacccgcagcctcataccactttcttttttcaatgtatccttcagctattgatgagatattagttgcaactgtagaatcaacagattttgcagttgaaataacactattaagcgaattctccaaattaacaaaatacgttttcttagctgctaaatcatttgttttttgtgatgctaaattagctgctgattgtgcatatccatatgaatcagatccattcaaattacttataggtgcatttatagtttttcctatttgggtaatataattatctatttttgttcttgcttttgacgcataatcaaccgcatcctccagagacgaatatacaatcctaacttcactcatttagtttttccccctttcaatgaagccaaatattcttcccacgctttttttctagcttgttcttcattatactcggctgttcgaatttgtgaatccaatgatgaaatttcagaatttaggatatctatccttgtctgacatctatttgattcattttgtaaatttgttttactagagttaattttcgtatcataactatcatatttttccttttcggaatcaatatcagaagatatggatttctttcttcccttaagaccggaagaataataacttgaacaatacgtaatcatattgttaatatttgtcacatcattatcaaaatctgttccaatcttcctaataatagtatcgacaccattttttcttctaacgagtgtatccctctcggaaactttcccactacgttgagtttttaaccaactacttgaagccatctaaatacctcccagacaaaattaatatctattgtcagaaccgtctaaagctttcgctaaatctgtgtctgcttgtatgtattcttgttccatctgatatatactttctgatatatcttttaagtcatcacttaaatctccaaattgctgactcaagactcgatactttttttcaaacatatctcttcctgccccagcccaagaaaacattaaattattttttttcccatccatattgttcttcaacgatgtcattttttcagctaaatctttacacaatttagcagcttcatcaaaactagccgtgtctaaataaaattccgaaccagatactcttgtatctttagccatttcatttcacctccaaaatttttattctcgaaatatctgttccatcaaggaaatatgcatctccaaattccagagatttcatatttctcacaacagatgattgtaactcacagaatttgaaatcttttaacttagatgttgttattaatacttttttattttctttctgtctctttaatatttcaggagcaccatatggtacattaacatcttcaatattcgaataaataaaactgatgcctaacgctttatattgctttaccaatttattatatctttctaaaatttgcttattcgaactgatatattctattgcttccttgctgttaataacaacaatttgtaatggcatcctaatcttttcaccaccttcattttgaagaagtaaattatatctctcttcgaatttttcttctaagtcgataattatttctccaattcgactgtaatcaagcgtatattcttctgtgtacattttctctttgaaatcttttagttgcctatttacgtcatcgattatgtatagattaaatgtattttctaatacataatactccatcgaaaacagtaaagattttaatacgcctaaccgtcttgaactttcattacctacaatgcttaattcatttatcttttcaaaatctatagagactaaatctacatcctcataattcaaagcaactggatatttgtattttacttggcagtttctataattattttctatgtaatcaatcaaaagcacttctggtatttctggaattgcctttgctcttaccccttcattttggctgttaacagcagaaacatactttttaatggtattcgaacgatctatttccttctcaccttcaaatgcaagaaacatctgtgtctcgtatatttctttattcatcatgcaaagtgctctgcccacttcatccttgggttgcattctgcaacgatcaaacaaagtactatactctgacgaatcattacagtgaagtgcgattctaccagcaaaattggacatatacttatatcctaaaccagaagtttgtgaattcgacaagataacattcactccacaagctaaaccttctcgcaaaatataaataaactcttcttcgtatgtatcaccatatatttcacgaaatgcagtgtaattgtccaacaaaacaaatattcttgggatatcttcaaatcctccctcttcatatgaagagtaagaactgattcctatgcttaaaaacttctcttttctagcactaatttcttcaactaatagtttgaacagattcttcaatttttcttcttcagaaattgtcacaacaccaccaacataacataaatcctggaaattttttaaatacatagcaccaaaatccattatatagatatttgcctgttttggtgaatagcaatttactatttgtcgaataattacttgtaagaaatttgtttttcctgtgccagaagaaccaataatcatataattctcattggatatatttataaatgcatccccttgatattgagaatccggatcatcatatattccaatggaaaccataccattacctttatttgtttcaacaatattcactatacttggtaatggaggtaagcagatattttgtaatcgctcaattccattttcaatacaagtatcccttacataatcaactattgcttctagctgtgtacgactactctttgaactatttgcttttttctttgcatacacaatcctttttcttccactaatatccacctgcgaaataatataggatttttccttagatgtattcgctttttctaatgccccactgaatcctgactggagcaactcaaatatctcgttattacctacttgcaaatatgctcgtccaggttccttaatctcagcagcaagtggtgattttaatacttcattactatcttctttattctgaactttcagacataatctaaactttgagtttgaccatatttgttcgttaacctgtccagatggtttctgcgttgcgagaattaaatgcactcctaaacttcgacctattctagctgcactgattaactctttcataaattcaggctgttcagcttttaattcagcaaactcatctactattattattaaatgaggtaaaggaattttaacctttccattcttatataattgaatatatttatcaatatgatttacatttgcttccgcaaataatgactgcctctttaataattctgcttttattgattttaatgagcgatttatttctcgaccatcaatattagttattgcacctatcaaatgtggtaagtctttaaactgatttaccattccaccacctttaaagtctataataacaaagctgacttcatacggatgaaatagtattgcagccgaaagaatataagtctgcaaaatttcactttttcccgaacccgtagtacctgcaaccaaaccatgtggtccatggaatttttcatgtaaattcaaagacacaatttcattttttgaatttacaccaattggagcagccatagtatcccatactcttgcttcattccaattttgaataagatcaatatcgtctaccgaataaattccaagtaactcaaatagactaatactttttcttaatgaactttcaagacttatctcctcacaatatattggttccaatatttgtgaaatcttctccatttctaaatctgagatactgtcaaaagaaaactctattttttcttcgcccttgtgcgaatcaatcaactctcccttattattatcttttattgatataatagagccacagtataatggtatttcttctttagattctccccaaaaaacaaacgaaactccaatgtcttttgcattttcaataaattgtgacactggatgagtttttattccccattcattcattactaaaaccactaagtaaggaagtccagcacatgatttcatactacgtctaattgtcaattccttgtataaatattcaaatacattatttctagattctgaatcgaaaacaatatttctcatcccatttgctgcataaatatgtgggattctttttacccagctatattcctgcacatcatcaattaaaaggaataatttaacatctccaaaataatgtctagaaatgacatcaatgagaatattcttaaatagcactttattcatttcttttttaccacaaataccaacagcactattctttttcaaatcaatagtaatcggactgtcaggaatcatcttatattcagatgtaagttcatcaggaatacatgccaattcatcatttgtctcaaatgattcaggctttttataatcaagttctctatgagcttttactaatcctttacctatatacaaccttaaaaagtcatcatccgtaggaattctatcaaacaaatttaaactgaaatttgaaatattttctacattagtatttgtatcaaaatatattttttcaaggattttcttttcttcttttctggctaattctatttcctgtcgcttttttgcaatataagaattatactgttcaaccctctctagacattctcttttatattttctttttgccgacacgaaagatacaattgacgttataatccccattgacatagagcaaacactaaaaataataaatgaattattgctggaattactcataaatcctcttaccacaattgttaatgccaacatagccaaagctggcaaaagggtcattgccaaattctgatccggttttttgggtttgtttggagcaactaataacccgattttttcattggaaattgtatactgtactctcgaatttctaacaaaaagcgggtagtggtttttttgcttatgatcttctgtggcaacattatttacaatacatttatctgatatatctgtccaaagtgaattgtctttcaaataaaaagaaatatctccaagcgaaaagaaatccatattttcaatgttttcgccattttgaattttgctgccatttttataaaccccatatgttgtcgatattattttaatcttataacctgaattacattgatgcaactcaatattatcgtttgttgcatacatactgttaataataatgttattagttttatttgtccctattttaaatgggttttgttgaatacatatcttcctttcgaatgagtgattttcactatcaaagtcaaccataaattcaacagaaaacacatcgttatttgactcctgatacttaacataaaaaacatctccatgttcgagtgttttcatcaataatctttttgtatctcctaatgtgatataaatattatccgaacacattaccatccacgaaccattgttgttcgaaaaatctaattgaacattctcaaaaaatgcatctcgatatagtctataatctgattcaatagatgttccaacacgatatactttagcatcaacaggaatctctatttcttcgtaaatatttttatttgatataattatcttgtacttatttacttccaacttaatactcctattctgtgtagttgataatagtccccgttctaagcccaaactcgctcaacaatttgtttcctttcactaaagcaatcggattttcacacttcaaaaaacactctttaacatttgttatatcaatttctaaattatacgcttcatttagcccaataataagttcacgagcagtaatatctgtaggtatttcaatatcaactgtccgcttactttttatcatattaaattgtacaagtattttcccgctcaatactgcacctcctctatagtattaaaaatgatatttttcgtatttcatttgaattcacaagattcttaacagcatctttaccaatattccccatataattaatatattcattaatactgaatttcaatgtaatttccggaagaataagtgcattatatgattctttttcaaacttattacataaaaaaatatatttttctgtgcttattccattaacatttgctaaaaaagtgtttgtagcatataccgtgttatagctttgatctatcacaaaaataactttatctgatatatccaataggtttgttttatattcatcaaaagtactttctgcgtcaactacaatataatcataatcaccgctattttttgccgacaatgcgagcttttcatatactaaataatcaactcctatcgacattaaagccgccttaaattccggcaaataactaaagtcctcttttctaatcacatgttttatatcatcatatattctatctgtaggatttatcagtttgccatatacatccggagaagaaattgccgttgtattgtccaacaaatattgaaaattctgcaaccttgctgcatttatatataaaactctcttataattctgttccaaacaagctgctactcccatagccacagtcgtctttccaacaccacctactgcagatgtaaccaaaataatctgtgtttccttcttctctacaacagcaatatttaatgcccctgtgcttttcccaataatctcattgaagatttccttaatgcttgtatacttaaaaatctggtttacgtttagttctcccgtactgccttcatcatactgctccatcattacaaaaatgttttgaatattatgtctctgcaatgatgaatcatacaagtcgtcagatataatcaaaatttcagcattctgcggtctggaaaaatactcatcaaaatatgctctatcagtaataatttctaaatctattttattaaaaaaatctgttacaaacttaaactgaagcggcactatataacttgcgtcttcgtctgcgataatcactttcggtcttgccatttctcacacctctttatacaatctgaaaatcactgtctgccatgcggattatatctccacgattaatctgtgctttctgtcccggattcaatcgaactccatttacaaatgttccatttgcacttccttcatcattgatgtaataaatacctgtccgattagttatgcggcagtgttttctgctaatcatcctattgaacggaattaccatatctaccaattcctgtttcttgcctattactgcatcatcacgatctattaccagttcaaaatgactcggtgcattcatggcaacaagtttaattgagccattagcgcttgttccaggcatcatctgacttcgttcctctgatcttacaataggtgccgtctctgcccctcttgatttgttgtacacatcctcaagtgacattgagccattacacaaatcctgtacgaactggtctaatctcgcattagaagatgtaattaccttatctgccagctttacaatgcttgatcttaattcactttcaaattctgcatagctgtcaaatgctctgacactcaacggcagatataccagttttaccttcagtgtattctgctctacaaatattttatcccatgacagatctatacactgacacgccagaaacccattatttcttacttcaatcacacttgcaaaaagattaattataacattaataagtgtatccggacttatacctacaagcatagaagacattggtctgtattcatcagtcacataatacaaatcaactaacccattccttgtcattttcatgcattttataaatatgccattattctggctctgcaataccttataatctgtgttcacaaattgtgagctatcctttagtatgtattcaaaattattaccacacataacttctgaaatcacatcattatcttttaatgtatacatatcctaccttcttcctaaatgctgtttgccacaagtaaacacttaatctgcattaaatatttacttctaacaaatagcttatgatttctgcacattttgtgcagaaatcataagatcctattttattttgcagccttaagctttctctttttaaagaaaactattactccagctcctccgccaattacaacaacagttcccgcaattgagccatagaataatgccttgttagcaaaccaacgtacaaataagttggttgatacagttacagcattgttaaatatataagagcttgtaaaatcatcagaattagtatctgtgacatttccagccttatcagtcaccacaaatcttacattctgtgcattagagctttcttttaatacaaatgcaccatcatagttatttgcatcagcactaaagtctgtaatgttatctgtttctttgtcattcacataaacctgtacggacgcaagtccaatagtgtcatagactgtgtatttaactgtctgctctgttgcattgacaatagaattctccagaccagtaacactcgtaatctccggtgctgtgctgtctactctaaagagaattgttttgtcatcataattattattttcagggctgtttcctgttgcatccctagacgatactgcaatcttataaactccatcagatgcaaaattgtcctttgcaatggtataagaatactgataccatccacttgaacctattgctacagtctcatttatttccggagatacactataatcagcattgtcaagaggtttgccatctcttaggatttcaatatcaagtgaatcttccactaatctgtcagcattatactcagtgataactaaatcatcatctacactctgtacatatgctccaccgtctccaataagagaaacaaggaaatcgttatattcatacactgagccaaatctgttgactgtaaatgtaatactcttgtcaactgaatgtcctgccttatcctttaatgtagttgtaatggtgtagattccatcattttcagcaatcttatcaaaggtatcaaattcaccatttccaccagtttcattggtagagatatgaccagtgataaacttatctgttacatctacattcttatctgcatagctggttctgtacattttgacttcacatgattcaaagttggtatcattaaagcttactgccggaaccacctcatctttaaatgctttaccatctgcttcctgaccattaattgtaatacttgcctccgttatctctgtgtcaatagtcatttgttctgatgtatatgcctgcattgcattagatgatttatctgtatatataattcctacagtgtaatctccatctcctgagattgtgaatgttcctgtgtgtacatctgtactattatcagtccagtttgcatttactgcagttgctacaccgtcccttgttactgtaatctgtacatcatcagaatagaagtttgcttcattgatagtaacagtcgcactaatatctccatcataataagcaattccatttgaagtctgtactggagtactgtactgaacctccgctgttggtgaaatattgtctacaataattctctttgtatcacgcaaataatcagattcgttatttgccctatcagttgctgtaaagtttatcgtaccattaaactgattattagcagccaacgcttccctcggtatttcaaatgttactgtacctgttgcacctccattcgaatttgtgatggaagaggcatcaactattgcatctaccagttctgcatttactccgcttactccatcagcttttacataactatatttcatagaattaattcctgaaatattgtcagttgcagtaattgtaactgtagctttagaattatagaatccaaatgtaacagtattcagaatagtgtctaaaatgctgttgctatatgtcacattcaaatctgtaggctttgatgtatcaactgtaaaatattctgttgcataatcatctgcctttaatgtagccagatctgtacactcaatatcaaatgtataattggcatcccccggatatgtaatggtcagaatattatcatccccattttttgtccaagctgataccgaatacagaccactagcatttatttcattgcctgatacatcttttgtaactaccgtgtattttgcagttgcctcgttaaagttatgttcttttacagtaattgttgcagtctgtgttgatgagaagtattttctctgatgattttcaacatccgtcattgtatttacaggactttcattcgcatactttacttctataaccggcttagttgtatcaataaccttggttgtagatgtatatgtattcatctggttattacttctgtccttatattccactaaaaatgtgtaatcaccatcttttgaatgatctgttgctgcagaaattatcacttttccaatatgtacatctgtgcttgtatctgtccatactggtgttatctctgtaaatgagccatcatttttctttaccttaactttgacgtcttctttgtagaaattcgcctccgtaattgtaaatgtagcagtcaaatcctgcttataataatccttgccattgtaagaattatctgctgtagagtattcaacattcatcgtaggtgctattgtatctactacaatcacattattagtgtctgtcaatttattgcttgaattattataattgtccgtcgcagcaaagcttaccgtacctcgtatctggtcagccacactcttcggaagagtcactgtcgcagtatattttgatttatctgtagagtcctgcttcgctgtaacttttgtttcagcatattctgctacatttgattcacttgccccagattcctttaaataactccatgtaaactctttaataccagaaatactgtcatgtgcagtaaatgttacttctacatttggattatagtatccaaatgtaatattatttaaaatcgtctgcattatcggatttgagtattttatgctcatttctgctgtattcggaactgttctatcaacaataaattttgaactctttacctcagctgccttgttcattgctaaatccgcataattaaatgttaattcataaattccatccacaaattgtttatcaattgttgctgtatgagcatcaccatctgttgtccattcacagtttcttagatactgctgtaaatcatttgtagtaactgtctttccattaatatcttttgcagatacatccaatttgatatcatctgttctaaaattatgttctgttatcttgactgttgcagactgtggtctctgtgaatccttatagtctttgaaatcaaactctatctttggaatagttttatccacgacaattgtttcagatgtataggcagtcatttcctttccagaacggtcttcataggtcatagatactgtatattcagcatcatcggaaagtgtaagcgttgcctgatgttcatcagagttttctgtatcggcccatgttacactctgtttttcagccgaaccgttgtttttagaaactgtaatagttacgtcctctgaatagaaatttgcctctactatcttaaaagtgaattcaacatcattagaaaaataatgtttttctccaacaatctgattcgaaccatcattattttttaatttgtattctactttctgtgttggtgcaattgtatcaataacaaatacgccttcgtctgtgtatgaaacagagttatttcctgctttatcaattgctgtaacctgcagattacctctaagctgttcagctttgtttcttggcaatgtcaatgttgcagaatatttattcgggtcatccttgtctacctgtgcacttaccgttccattatcagattccaaattagaattacttgcaccattttcccttgtgtacttccaatcaaaatggtctactccggaagttacatcataagctgtaaatgttactgtaatataatcaccataatacttgacagaatccttttcctccacatccgtgaaatctatattcacattatatggagctatcgtatcaagtttcagattacttatctcaatctttttggtaatacagtttcttcaagatatatataatggctgagcgatgcaccttgatcctttgcctcagtttcaaccgtttcaccaaattttacagagtccttgaaggaaggtttatcttttgtcaactcatctgctctgataatggaatatccatctgccggcttaattatcaatgttgtattataccaatcattttctccgtttggctttattaactcggtctccaaatcatctgcagcataaatcttatatgccgaagtaggtgcatctgacatagaaatcttcaatgtataggatgtactatctgccggatagtatgctttactccaccatcctcttttactatattctgccttatcagcttttatcgttacattcaaaattccgttgccagcttcaattgattccatcactttactataatcggcaatagaaatcacacccgatttactgtcaatgctaagtcctaattcagaaccattttcaatactataagaaattgcgcccttatccttagcttctttcttcacagctgcattctctgttattccattggtgtttcctaatatatattcaattgtattctccggaaaagaaatccactctcctgctacgctttttcctttcacatataacacatgttcaattgtactttcattataattatcatttccagaaagaactgccttaatcgtaattttacccgcaccattaacagtcagtactcctgtctgtgaatcaatagttgctatttcatcgtccccctcgtcaaacaaaacactatatgtaatcgttccaccagcttttttctctttatctgtagctgcaaaattaaattcttttccagcttccatttcagcttgcgtaatttcaacactagtttcctctccagtgtatttatcaaaagatattacctgtgatgcctttgccagatatacattgtatggtgcaactgcattttctgcctttataacatctacattcttatcatcatagtattgtttagtagcttttacccagacgatataagaaccagcatttgttattgtcggaattgttgtatcccaagcatctggatttgcagtctggcttccatcatccaactgataatataacgtgtaatctccctgattttcaactttgactgcctcctgagcctttccgttataaataccatctaatcctgttacttttaaatctcccagattaattttcgcatttgaaattttagctgttacagtcttttcaaaatcattataattatctctttgtacgactaatttaactgtatattcaccgactgccaattgtttagggatatcctgacttcctgtgcttttaccatttacataccatgttacaatatccttttcaccaaaagcacctgtcatcaaaaccaattcctgctctgttgcgtctttatattctacctcttttgctgtaatgtctattcctgttatatcaactttatttattttcgcagtttgttcgccagataaatatgtactgtatccatcttttgtaattttcacatacacaggatactcaccagcattggtctctgacggacaagtatccacccatgtgtttccatccctagaatattcaatagttacattctctgttgctgctgaaacactaactaaattctgtgcctctccgttataatctgcattaagcacttcaatgcttactccttcaatatctggcgtagattctggtttagattcagctgttaattttacagaaaaatcttgcgtattagaagttatatctgcttcatttatagtagttgtatctgtcgtgtatccttcttttgatactgatgctgtaatagtaagatcatcataataattagatgcctctaacacttcaatagtaccataactgtctgtttcgccactttgattgattgtttgaaaattattagtaccattttccttttccttaattgtgtatgtaactgtagcaccattaatagcagcaccatctgcatctgttaccgtaatagtcacaaagccctggtgctcatccgtctgtgcgcttactgttactccagctgatgggaatattgatacaatcatcaataacgccataatgaatgccaatcccctctttcggcaattccttttgctcatttccttcattcgttaattcctccattctatttgtatgattactctcttatgcattttctctgagtcttccttgttttcttttttattaaataaagatatatcaatattccatatcccaacagtccactcatcaaatcacctcgtccgtatgtaccatgattacttcttccagcattttcatagtcacagaagatggcatacgatttctgacattgtcctcattccccaatgaagcagtttctcctgattcatcaagtaaaccagtcgcatcctgatccaccaacaaccccgtgtcttcaatttctcgttctttcgctaaattctcgttcagcaacccagtttcttcattcttattcccagattcgccaataccatccatagttccagtcagttttcctctatctagatttttcttgcttgccttatacgatttatctcctgttttctcatttttctgcctcatttgagcaattgattttctggcattatgacctgacaagtcaccaattacatctggtattttaaaaacaaaccaaaatataattgctattaccacaaacaatacagctaaaacaaatgagataattgaaagtgtatgtaatatctctgccatttttacttcctttcctctatattagtgtatgttctttcaattgcttctttgtatgtttcatacttatcaagaatctctgattgaagtacttttgactgttctttttgtactgtcagttcatttgttcttttgtatatatcatcatacaaatccaatattctctgtctatcaacattaacctgagccatacttgctctttgatcataaagaagcataaacacactgttatataatgtcagctgatcatatgcaccggcatcttttacagagttaatagcgtcatctatcactgtaaaaatctcatcataattctctttagatgcttcttccactgtggtcgtatttaatatgtactttttataaaaagaacatatctggtaataacagtctgacatggtctgctcttcaaatcctgttgcactctgataattttcattgaagaagggataggctttctgtactctggtcgaaaagctataatcaccatcattattttctgtatagtaattgaaataaagcataccaattatgtaatttaattccgacacatcagagcttgtcgcatctaattgatctttatttgcattatatacagctaaaaaatcatcattctcctgtttactgaaagttccttcatcctgatacgcttctatcatcttgacatatgcttcagttctgccaggatatatttcaactgcgtttttataattatttatcttgtcatccaacgatgaagctgttgaagttgatatcaatgtttcataatcactattattcattcttgttgaaacgatgttacacactactcctgatataaccattacaaccgccaatataactgatgttatgaaacagtttaattttcttttctgtttccttttataatctcttgtaattaactcaggatgttccaaatcgtacaaaagatcctgacaattctgatacctatgttctgctgccggctgaacacacttatctattatcatttccatgccttctgaaacttccggattccacattcttactggagcatatgcttctccggttctaggatctatgcctgtcagaagatgatgcattgtcattcctagagcataaatatctgatcttgcatctgtctgaccgctatactgttccggtggtgcatatccttttgttccaagcactgttgtatccgccagactctgctccttatattctctagctataccaaaatcaataatttttatattgccttccggttttaacatgacatttgcaggcttcatatcacgatatataatcggaggcttctgcgaatgcaaatatgataatgcatcacataactgtttagcccatccaatcactaattcttcaggctgtgcaccatattctgccaatatcttatctagtgactcaccttctatatagtccattactacataaatagtaataccattatctataatatctactattcttggaagggatggatgatcaagtcgcttcatcatgtttgcctcagcaagaagactgtttacaactatttcatcatttttcccgcttcctttttttttaatttcctttactgcccactgtttattgagatgagtatccatagccagataaacaacggacatacccccatgtcctatttcagtaagtatttcatacttgccatcaataacagatcctatttcagccacgtctcatccccctattccgccttgattaatacaaccgaaatgttatccctttcatttcgttgctttacaagttcaattaaatatttcgcataagagtgcattgcatttttgttaattaaattgatagggtttagtgattccacaatttctttttccgtaatctcatgtctaaatccatctgaacagagcatatacgctcccttttccaccttttcaaccaacacctctggttccaatatctctgaagcacctacacattgaaggagcatatttcttcttttatcagtctttgcttgttctgctgtcatggtgccttttctaatttctcttgctataaatgtctgatcgtaggtaagttgctccaacttatttcctatatgatagagtctggtatctcccacatgtactgtcacatattcgtctccaacaaataatgtccctgtgaatgtggttcccatcgtaatattatttttcttggcatactcgataatcttgatgtttaaatccttaagcatgagcgaccatttaccaccaattacatgcaaatccaaattttctaattcatagggcagttccttgttgtaccattctgaaaattcccttataactgttgcacttgcaagttctccctttgcaagacctcccattccatcacatataacagccatcagcacttctccgccagaataagtaccatgcttaaataacacgctgtcttgatttgtttcttttgcgatgccaatatctgtatcagctgtaactgtaaaatgcattctccttctcctttggttaaatcctaaactcaaactcctcatttgctaacctgatagcgtctccatcatgaatttctgtttcctgttgtgccggtatcggagttccatttacaaatgttctatttttagagttaagatctacaataaagtatcttccacccctggcaataatatccgcatggctcctgcttaccatattattgttagcaacaaaataatcagaataacttttttctttaccaattctaaaaactggtttattaatcaaaaatgtttcattcgtcaacaatctgtacattgacgcataatgtatctgttcacattgagtatccaacaaccccgttgcttcttcgtcataattattcagtaatcccgtgtcttcatctgcaagcagtccagttgcttcttcatctgcattgcccctgccataatgttcataataatgctgtggcttatctgtaataaatccactctgtccgacattgtgccgcttaattgtatttacaacacttctgtcttcactaaaaatgtatttttcaattttttcagcctcataggatgtcagagatttcaaaaaatatacatatctcgatatatattctgtatctgcctcctccattgttttcgaagcatatataatctgctccataaaccttaatacatcagcttcttttttatcattagtaagaggcaaatatataaattgtagttccttggttgtctcattaataaagacataatgtatatcccagacgacgtttctcaatatcaatgaattcaaattggctttctgtgttatatctacaacctgctccataatgaagaaaaaatcatactttgatattggtttcttaagcctgtcaaacaaactgattccaataggaccatagaattctatacagtttttcttttttgcctgtactttcaaaagacctcttatatatttactagagaagaaatctaattgacgttcatcaatttcttccttaaaagagagcttaacttttactttaagctggcaatccttacccttaactttatatcttgccatggttgttccacctgcccaatatttatattttgcgtagaactatatgttctgcacactaaaaaataattactttaatagataaatcgtatcaaatcaatagtgacttgtcaacgaaatttgtcgaaacacaacaaattcctaacaaattgcgacgacataaaatcagtaaaaatgattcaaataacagtttttaatctacgcactaatgactttcagctgttcctataacgtaaaataggacatcctctaaatttgtttagaaaatgtcctataagtaataatttattcaaccctaagcagctcacagtttccctgcatatccttccagaaatcctttataggtgtgccgcgaaactgattgactatgctgcagttcattgcaccgtgtcccacgacaagcacatttttgcctgcctcaagctgcggtctcagcacctgctctataaactcgcctgttctgtgatatagctcctcaaagctctctgcgccgtcctttgccacatatttttccggctcctcaaagagcaggtagacagggcattcgggcttttgcctgatattcttcactccctcataatcaccgaagcacatctcgtgaagcctgttgtcagtgataatctctactgctgggtttctgtctgcaagaaaaatccttgccgtctcctgtgctctcttaagtggggagcagtagcatatgtcaaaatctatatccttatatttttctgcggcatcgtaagccatctgcctgccggtttcgttgagtgggatatccacctcaccctgcagtctgtgctcctcattccaatctgttcttccatgtcgcaaaatataaaacataattaatcctcgatttctccatttctatgtctctcgaagaaatgccttgtctccttaataacaacaccactaagagcaaacagcgctatcatatttggcagagccatgagaccgttgaagatatcagcgatagtccacaccgcacttacagtcatataaggtccgatgaaaactgcaagtatatatatccagcgataaacctttacatatttcatccttccgccactcaaatactctaagcaccgctcactataataatcccaaccgagtatagttgtaaaggcaaaaaatacaagacacagcataagtacaaatgctgataactctttcggtaaaggaagaccattctggaatgcgtatgtagtaacctgcacgccctcgagtccgtcaacctgccatgcgcctgtgagcacgatggaaagtcctgtaagtgtacatataactattgtatcaatgaaggttcctgtcatgctgacaagtccctgacgtacaggctcctttgtctgggctgctgccgctgcaatcggggcactaccaagtcctgcctcgtttgaaaagattcctctggcaacacccttttgcattgcaacaagaaagcttcccacggcaccgcctgttatggccttcggtgaaaacgctgcctttactattgtagcaaacgctgccggaaccgctgtgatattgcataccacaagcacgagcacaaatacaatatatataacagccatgaaaggaactattatctggctgacacttgcaatacgctttactccgccgataagcactgctgccacgcagaatgccagtacaagcgaagcaatgacaactgaccatgaatactcaccaaggaacggtaaaacctttactgtatgctggtttttagggtcaaaaaagttgtttacagcacttgatattccgtttacctggctgaatgttcctattccgaaaagtccaacgcatacgccgaaaaatgcaaatatctttgcaagccatttccattttgtacccattccctgctctatgtagtagaatggtccgccgagactatgtccgtccttgccgatgacacgatattttacagccaaaagtccctctgaatactttgttgccatgccaaagaaggctgcaagcaccatccagaaaagtgctcccggtcctcctgcaccgactgcagttgctacaccgactatgttgccggttccgattgttgcgctaagcgcggtacagagtgcgccaaagctcgtaatctcgccatcgccgccctcttcatttttgaccatccactttagtgccagaggaagctttctcatctgaagaagccccagacgaactgtgagcattatacctcctgccatgatgagcaccatgagcggcactccccagacgaaatcgtccactgctttaagaaaaatgttgattgtgttccacattgaaatactcctgcctctcttttttatctaaacacaaagtctttgtgttttgagcaaatactattaatataaataatttcatccggaaacaattgaaaaagcaggcttagcagcacttacgcgaattgaaataaaaaaccccatatacgctgcatatacagtctgatacatgggattaagaagattatcttaagaatgtctgtccaatatcttctccgtcctgttgcctgagagattcgtacgagaagcagcctgtgccatgatatattcatagtcactgcactcctactgcttcctattcgtacgttgcaccttcggcccccgccaagcgggtgtctccagagagtcgatccatttacagttgcaccgcctgctgcggcacctgagagttttactccttcggtaggctttgataaggtaaaatcgctgccgttttcctgcaaacttcatctcgaaattgtttattttaaatttattgtttttattaaccgttaagaattatatgacatatatacgatttaatcaatagcacaaatgtactaaactgtctcaaccttaatcacattggtgttgcctgtcttaccattgatgagacctcctgtgagcactatatgatcaccttttttgagcttcatgacactctttgcctcgttcatcgcattgtagaacataacctccattgagttgtattcctcgcacagaaccggctttaccccccagctcaggttcagcttgcgccatgccttttcagaggttgtcatgcctattatatcaacagggcagcggaaacggctgaccatgcgcactgtacgtcctgtcagtgagctgactacgatacatttcgcatccacatctattgccatggcacatgtagcatgtgaaatagcgtcaactatgctttttgtctggaaatccgcattggcaaatctcttgccgtagtttatctgcttttccgtatactctgctgtctctgccatattttttacagcctctacaggatatttacctgctgcagactctcccgaaagcatgatagctgatgagccgtcgtatacagcattggctacatccgaaagctcagctcttgtaggacgcggattgtgaatcatggactcaagcatctctgttgctgtgattacgcgtgtaccaagcatacggcacttgttgataagatacttctgtattgcaggcacctcaactcccggaatctcaacaccgagatcacctctggctatcatgattccatttgctatctcacagatttcctccacatggtctacacctgagcggttctcgatctttgcaatgatttcaatgtcctctccaccgttttcatccaaaaagcttctcagatcagctacatcctgctttgtagaaacaaatgatgcggcaacataatccacctcgttttttataccaaaaagcagatcatccttgtcctgcttgcttaaatatgcatgcttcatgaccttattcgggaagttcatgctctttctgtctgaaagtgtaccgcctgcgataacatcacagattgcatcgtttcctttaagctctcggacctgcagaatgatgattccgttcgcaacaagcacacggtcaccaacctttaaatccttaatcagattctcgtaattaactgatactcgctcctgatttcctacaatatcgtcagtggtaagtgtgaatgtatctccatccttgagctctattttgccattctcaaaggtcttgatacgatactcaggtccctttgtgtcaagcatgattgcgattggcatatgaagcttctgtcttaccttcttgattaaatctattttgccctgatgctcctcatgtgagccatgagaaaagtttaatctggcaacatccatacctgcctttatcatcctggtgaggacatcctcatgttcgctggccggtccaatagtacagataatttttgttttacgcattgatattcctcctgatgctgatcaccctatcagcttttcttttaaaatataatctcacccgaagtcattatatgacaattttgttcaacaataaagtaaaaatatatatttttcaattatttaaaaattcatatgctccacatacatttcattgaaatgcggatacgatgccaactcgatgtaacgcatgttcccgcttatctccagtgctctttcccaggcttcctgcgataaagctgccgaaacagctccgtttcctgccgcatttcccacttcttttgccttgtccaaaagctcctgtggaaacaatcctattgccgccgcacttgctttgtcaatgtagtttccaaagcctcccgcaaatgtgagaacatcaatattacaaggcgtacagccatattccttaaacaatacttctattccggcggctatcgcgcccttcgcaagctgcagcttcctgatatcctcctgcgtaatgtagactccaggtgcaatatgaacggcgagagagagctctgtgctctgtgcagtctcctccgcttccacctcaaacacatacgacctaaacagtataggaagctcctgtccgcttaaaatcgtgccgttttcatctatgattccggctttcagaagaacggcaagcgcatcgataagccccgaaccgcacagtccaacaggtctgtcatttccgataaccgaatacttaattctgcgaccttccagccataccttatccacggctcccttagccgccggcatgcccagctcaatctgcgcaccctcaaaagccggtcctgccgcggtggcacagcacacatatctgtcgccttttccaagcgccatctcaccgtttgttccgatatccagatatagcgtcagctcgttgcagttcactgtctccatcatacccgctgtaatatctccgcctacaaagcctgatacagccggaaatataatcatggtttgacaattctcaagtcctatatccaaaggattaaatttcctgccaaaatattcatccggcataaatggtgccttgccaagcttttccggtgaaattcccataagcagatggcacataaccgtgtttccggcaactgaaaaccggctgactttagttctgccacattccgtgagcatttctgatatccagccgttaagcagggacactatctgtgtctgcatcatctgcaggccgccattcgctttatcgttatcatccgccctcgctgccgcatcaattctagaaagtacatctgctccaaagctgcgctgtggattggcaccgcttctggttgagataatctgcccggtctctttatcaatcagatagcagactactgttgtggttccgatatcacaggccgccagagtgtcttcatttgattcgactttttcagattcatttgcggtctcttccttcaagacaacattcctattcacatgctcatttacatgctcattaaatttttccgatacatttcctccatttgtcagaacaaccatgctgtcttctttggttccggtgctttcttttctcccaacaataatttccataccgtcacaaatcttcgtctgacaggccagcacatccttatagtatggttttgtcaccgtcaccttgcatttaccgcaagtgccttttccaccgcacggtgtttctatccctgcaatgccgtgactgcggcagtattcaagaatagtggttttgtcggtttttttgctatctgtgttaagatttatggtaattcgctgctgcatatagtttacctcatttgacattgtactattatggcttttttctttgattgtatgataccacatttatatatacttttgtaaacaaagcacgagtatcgtgcggttttgtgaatgtgagtgggagtgattctgaatagttacctttaatataaagacccggacaaacgcccgggtcttcattgatccatatatactatgccatattaaactatgtctgatctatatcatctagtatatatcatctaatccatgcacatgaattattctatttggtaagtgctgcaacaagctcatccatctgcttttcagatgcctcattgagagtagatttaattgtaacaacaggctcaacacactctatgttcttgaagccctcaacaatagccttcatctggcgtgctgctgtaggagcccatgaaccgttttccacgaaggcaatcttacgattctgataagcctttgccttgagatggtgtaagaaatcctccattggtgggaaaatgcctccatcatatgtgcatgcgcagagcacaagcctgtcgtatctgaacgcatcctcaacagcctctgccatatcatccctgcaaaggtctgtaaatgcaacctttacgcctgtagccttgagcttttctgctaaaagctctgctgccttctttgtattgccgtgaatagaagcacatgccacaaggattccctcatcctcaggctgatagctgctccatgtattgtatttatctatgtagaagccaaggttctctgtgagaatcggtccgtgaagaggacaaatcttttcaatgtcaagccctgctgcctttttgagaactgcctgtacctgggcaccatactttccaacaatattgaagtaatagcgtcttgcctcacatgtccagtcctcatcagtatcgagcgcaccaaacttaccaaagccatctgctgagaaaagcaccttgtctgttgactcgtactccatcataacctccggccagtgaaccataggagccatgacgaatgtaagctcatgctttccaagagaaagcttatctccctctgccactacaacctttctgtccgttaagtctatatcgaaaaactgtcccatcatgttaaaggtctttgcattacctacaatctgcatatcaggatatgcctctgcaaccttctggatattggaagcatgatccggctccaaatgggaaacaacgagataatccggctttctatcaccgagcgcctctctcaaattggcaaaccacttatccgtaactcttgcatctgctgtatccatgatcgcaattttgtcatccataatcacatatgagttgtatgaaacaccgtttggaacaacatactggctctcaaataaatcaatgtccttgtcatccacaccgatgtaaataatgctgtctgtaatcttcttgtccatgataggtacctcctgctaataatctccagttaaattagtaattattactatttttgattagattatatgacaaaagtatcatttggtcaaccgaataaattgtatttttttgtattttttgatattctcgcctaaaggttacactgaaacgctcatccacttttagttgcaaaagtatattttcaacaaatctgttgttgctttgtcatttatgacagcccgtcctattgttatgccattgttgatgataatatattctccgttttcatatctgacatttacaaaatcatcttccctttttaagtctatacatatacttgatataattccgcaaatctcctcttgtgagcttccgctttttatctcataagcataacccgcatctcctatctcattcagatcagttaccaaacaatactccgctccattcatcagcatttcttcattcaaagtgggtaattgagccgtcttatactcattaaataaaaagataactacaagcgcaatgaatgtcggaaaaaagataccgccaaaccgctgtgcataattttgttcttcccaccgcttgctatgacgaccaaacagcggtattttcatctgcaccaaacctgctcctatacttacaagcaaaaaataaaatataacttttatcaaagactcatccccatttaatcattaataaaaatatcgttcctaaaacgacgcctactaaccatataaagcgaaacaccttgttatatctcgaactattagaacacggaacaagccaatattcctgtggaaaccccaaaaggtattcttttaattcctgcttcaattccatgactatactccacattaatccagacagcacaatgcacaccgttccataatatgtaattggtgcatttgtaaccacagcaaagaaataatgtgccatcttaagaaggaagatacaccacgcaatacagcatggaattgtaaacgcccttttcattttccacttcaaacccaatataacctctggaacgaatacagtcaatgcccccatcggcaatcctcctgttcgtccatgtgtgaaatcgctctccgactccaaagaccaaattcctgtcaatactattactgctggtattagtatggtgcagaacaagttatatgcaataatcaacacattttcattgtcgtcgttcataacttagcccccaatcagttcatcaagcctgatagccactcttcctgacaatgaataatgcaatgctgttagctttgccttatcgtacaaatttgcatacacgttataataacatagcgatattgacataccaaagccaaataatgttgttcctgccaatactcctaaaaatcccgtaacacatgcatcaatatactgttggctgacatcctccggctccaaatctacatacattgcatttaataattcatttacagaagccgtactctcatagtggtccttaaatgaagtgacaattaactttgctcttgatgcggttttttccggatcaaacgtagataaaccatatatcgcatttgcggtatttatggatataacttttccctcatccaccgcggttagaatgtctgacgaattatttaccgcagacttgaactcatccataaaattaaccagatttgtagagaacatagaaaacttactttgtgctataaaattctcatatgctgtaatatcatctgaagtaataacataagcatatatattatcaaatcctggactttctttagtataattaggattgtctatataatgggacatataaagataaagtacatatttgttaaaatctgctgtgttatatgtattaccatatctctctaatgctacttgtgtaacatattgcatcctttcattctgttcttgtggggttgctggcggattaccgttctgtgcataagattgaatatacccttgccctgctattgcgttttctaatgcctttgtttctactgtttctactgataatctagctatgtccgtgttcaacgacgcataatatggagtcatctttcctttgcatctgcattatattggcaatatcctccgaatcaaaaccaatattctcccatgactgtcccgctactgttatatcgttcagcactgtcaacatatcatccggattaatccgagccgatgatgctgcatatatcggctgaatagaacttccaacggttgaaataaacatcaaacatattgcaattaccacgctaatgactttcttaatcattttgacccctcctgttctttttactatcactctaattaccatataccaaacatgtatgcccccaaaaataagtattatatagttactggaaaatattcttacttgacagagaaacttaaggtgctggaatagttggcatctttctccaaagctcatttcaatataaaccatgtttttccgcgaccgagttaaattcgcccatactgcaatctttttacaccgattactaaagtgaatccaaaaagcatatcaaaatgtgcctttcaagatactatcgggcaatataaacatgttcaagtcatttcttcaaagcctaaaaataacttcggatcgcattgatccgaagttataagtatcatatagctatcggaaagcattcttacatttcctgcaattttaatttattttgcctcataagaagaagtaaacctagtccgtccagaatcgacttgattattatacgcatctacaatgtcgctatattccgttgaatcgctaaaaggagcaatatcgcttgtattgtcagatacactcatgttagaaacaggaccggaaattaacaatgacccgtccggctgggcataagcaaaaaagatatattcatttcctacaaccggaagctcatcaccctcataaacaaaatattgtgagccatcttccgaaagtccgccagatttttgaatcgggatagccgtgtcagtaactaaattgcctttgatattttttgtgacgttcacagtataatttgtgtatgggccggaaacttcacgagtctttccatcgtctgtttcaaccgtaacagcatctttataaacagtaccttcttcacttgcgaccgtaccaacgaatacataatcagcatcgcctacaactgcattcagatcgctataatcaatcgaaaaagtacctctcaaatatgatgtcgtaatttcgtcagaagttgaaggtttcgcaatgccaaaaaacagcccattaatccactgaacaagttttcctcctgtcgccgcattggcaatccctcctgttgtaaaaagaatgatacttaccgccattacagttacaacgcgagccaaccatttacggctatgtgcgttactttcattaaatagtttgatcttcttttgtgaggaaatatcgctttcctttttttgctctaaacattgtgcagcttctaggatatatttatcgttaatttcattcattgcataaaaaatatctgatttcaaagttttcataaatacttcctttccgctaattgttctctcagcttttttcttgttctaaataagattgtttcgactttgcttttgctcatattacaacatttcataatttcttttaccgacataaagtaccaatatcttaatacaaaaacttgtcgatgaggtttttgcaacgattccaaaaaatcctcaacaatatctttcaattcattattttcccaattttctcctcccgctttcgccagataattactcaattcctcatatggcaaacacatatctatatctctttttgccgcatgaatatgttcatacttttttagcgcctgattccttgcaatttttaaaatataagctttcaagttatctggtgtttttgggggaatcgtaaaccagactcctaaatatgtatcatttgtacattcttcaacatctaactgattctttatcagcctgccaattataaatgatacaagtttcccatatttcttctctgtttctagcaatgcatcctcggatcggcaattatatagtttaattatttctctatcgtccattacaaccctcccttatttattaagtacggattcgatcccttttgcttgcaagttttaaaactttttgctttatttttttatttgtcatttcagctacacagaatgtagcttttgatgttaacagtgcctaaccctttccatgctggtgttttaataaaaaagccagaggtcagtgtctctggcaaaatgtatattatattaagtttgctaagttcgtccaatttgcatcataacccattatggacatgatatctgtggctgaaatggtatgtaactgtttttgaagtttgccaaaagcagttctcatagatgaaataaagtcctttaagtcggatttgcttagtaatagcgcaaacattatagctatggcgtatgcatcattagttccataagtataggcgccatctttggcacgtacaatccctaaaacggagaaatttttaatactttttgtatgatttatctgccatggtacctcctatatataaaaagcccccgggtccgaaggacaccggaggacaaactggcaatctcttgtataagtattatactacacattggcaaaatgtcaatgacactatgctgatttggtgtggatccaaatttttcaatttcactttattaacctgctattccaaaaacaattcaaacccataacagctctacaaagaaacaaggacattgatatttactatcaacatccttgttctaattattacaccatctcaggaagtttgtagcctaatttttacattgcgtctgcgaagtcatctaatgacatacttactctacttgcgcctacctcaggttctaatataccatcctgaacaagtgaatatatttcaaggcatctgccttgttgtattccttcctgtatgccaagctttttatgatcatcctatgccttacacatatttaccacatcttccttttcatcatacttaatatcagttcttgtctcaatataacctatcacctacaataattgcccataaagcagtatcgatatactcaccatttttatagtatttttgtctggcaatgccttctaacaccatgccgcatttctttaataccgcagaggaagcatcatttccatagaatacttctgcctgaactctgttaaatccaactctatcaaaggcataatctaagacagcctccaatacttctgtcataatgcctttattccaaaatccgggagacaacatatagcatgtatcacacatatgacatgcttcttccacatttcccaaattaattgttcctatcaattctcccgtttctttccactcaattacccaatgaaaatatgaatccgactcataattagatatccaatgctttaccttgtccctatatatttctatgtcatcaacaggattaaatggatagtatctgcaaacttcatcatacttagcccaattttcatacatcatagtataatcggatagtttgattcttcgtaaaaagcatcgttttgtttcaaaattctgtgtgcctatataattcataaattattccttttcatattcaaaataaattcctgcaaatatctattaatcacctacatggtaaaatatacagatacaagatacatctactccccctgtaatataaaaatcatgccccaacacaaatcagttggggcaatttctatacttttaagctattatactacaccatctcaggaagtttgtagcctgctttttgcattgcgtctgcgaagtcatctaatgacatacttactctacttgcccctacctcagggtctaatataccatcctgaacaagcgaatatacttcaagacatcttccctgtttcattccctcctgaatgccacgctttttatgatcgtcccatgccttacacatatttaccacctcttccttttcatcatacttaatgtcagttcctgcaaatagattgatagctgctactgtctcaacgtcaacccttgtaaaggtttcgtcttttgtaattaaatcattcagctttccctcatctgacgcatttttcagcacttcaaacagtggtttcagacctgttttgaacttggaaaaatccgtaatctccagtggattcaacagattaatcctgtaatcgttgataaatggccgaaatctctcgtccatatgaggcatcatctcaacaagacttcttggaccatcccagttttttgttccaagatataatgtaattgtaatcaccggtgtcagcctatcctcaagtgtaaaccctgataaaaactcatctgatgatttataatctttgtttttctgatgttgcttcttcgcctcgttgacctgttctccataattcatggcatcataaatcatggtcttaaccggcatcgaataatgaacatctgtctgtgcctctatccccatcagtacgatgtatactgattctgtatattttacagacaccccctttagcaaatctctccatttctgcttaacaatctgcttcctatcaataccgaaaactgataacacctctgtggtgtcacattcctttaaattctccggtttgataaccttctcaccgtcaaacaatacataattgcagatttcactgaacctcgtattgtctgacaaatactccttcgccttcgagtcctttgtacccaaattaacctcctcttcttgtgtgagcaggaaaattcgaaatcgaattaaaatactgtatgctaatataaaagccggcaaaatccccacaccccgcttttctcgcaatgttttcacatctgacatttcaattttcctgctattaactggtaacataaagcattgaaaatttccatgtctttgtcgaaaaatgcgaagtggtctgccctcttcaaagtgatacacaccggaaaaatatgctgtggtgtcgtatttacagaaatataatgctttgagttgattgtagcacacagaagtaagcttgtcattatatttttatatttcagctacctgctattccaaaaacgactcaaacccataacagcttttctcaaatccatacttctcataaaatgtatgtgcagcttttcgaggcatacctgaatccaatatgattgccttgcagccacgcgctttggcaagcttcttaacatgatcaaccatcagcctgccatatccctttcccctatatttttcatctgccctgcattagtcactataatggtttgactgacgccacatattcgtttagcttcgctcttatctcttcaaactgctttcctgtaacctcattatccgactcaaatgccatcattttgtcaagatatccacgctcatttgctatctgaagactgataggataaaccagctcaaatgtcagtgcaatatgccctgccacatggtctaccacggtctttttgcaggaacgaagtactgcgtgcctctcatcaaaggcagccataacctcaggacttacctgcgaatttttcagttcctccgtcgtcacattatatatatcctctgccggagtatctacatttaccctgaaaatatccaccttatcagcatcccttagtatattgcaaaacataaccgtatactcgtcaagcctctcatctattctgaaagcactgtgatttcttatcgcattttcaacaattatgccgtatttatcatcatgaaatccatccacatatgtgtcgataagaccttccttaaacagcaggtcggctccaaaattggcatgatcaacagactgtacatcgttaaatgtgttataacgcttaatctgttcaaatcttccgacatcatgcagcatccctgtgagccatgccacatctgtctcatattcatcaagctttaaatcccttgctatcagctcgcaaagctccgctaccctataggtatggtctattttgagcttaatctttgggtctgtggcattgtatcctgatgtgtactctgcgaatgtattttttactcgttctctatctattatcatgtttattatcctttcaaaaaaccggtttatctgtggcttcattgctgctgttttaactcccatcgcaccacatcgctatgaggattaactctggcaagtccaatctccgtaattgccgcttcaaaaggcacaaagctttcctgcattactgaaaatgccatctgcatctgttcccttgtcagtgtctttccaagtgtaatatgtggcagccagctcattggcttgtaatatctgctcactgtagattccggaatgcttttcacctcatcaaatactttttccgataaatcctgcaaatacccgttaagcaccggcgtggcataaaatacatatggcagcaattgtccaactgacacaatgctaatcgtcccattagaaagtgaatttcgcagattatccattgctcccaataaaactttttcacttcgggcttctattgccgatatcgtcatgtgtggcggcacattgttatccgtcatgaatgaattacctgttttctcggctattttatttatatatcgttgtaaaatatgctctgccgtcttgtcaaaatatacagatacaagatacatctactttcccctgtcatataaaaatcatgccccaacacacataggtcggggcaatttccgttatacttttaagctatcaaactacaccaattcaggaattttgtagcccgctttttgcattgcgtctgcgaagtcatctaatgacatacttactctctttgcgcccacctcgggctctaatataccatcctgaacaagtgaatatacttcaaggcatcttccttgttgcactccttgctgtattccctgttgtattccttgctgcattccttgttgtattccctcctgaatgccacgttttttatgatcatcccatgccttacacatatttaccacctcttccttttcatcatacttaatgtcagttcctacaaatagattgatagctgctactgtctcaacgtcaacctttgtaaaggtttcgtcttttgtaattaaatcattcagcttttcctcatctgacgcatttttcaataactcaaacaatggcctgagccctgtctcgaacttggaaaagtctgtaatttccagtggattcagcaaattaatcctgtaatcattgatgaatgggagtattctttcatccatctgtggcatcatctctgcaaggcttcttggcccatcccactgtgtagttccaagatacagtgtgattgtaatcaccggcgtcagcttatcatcaagtgtaaagcctgacagaaactcgtccgaagacctgtaatccctatttttccggtgacgtttctttgcctcgttgacctgttctccgtaattcaatgcatcataaatcatagttttaacaggcatcgcataatgaatgtctgtctgcgcttctgctccaattaagataacatacatttcccctgtatgcttcacggaaacactttttagcaaatctctccatttctgcttaacaatctgtttcctatcaataccgaaaactgatagcacctctgtggtgtcacattcctttaaatcctccggtttgataaccttctctccgtcaaacaatacataattacagatttcactgaacctcatattgtccgacaaatactcctttgccttcgagtcctttgtacccaaattaacctcctcttcttgtgtgagcaggaaaatttgaagtcgaataaaaatactgtatacttatgctttccacgtatatgatgtgtacaataatcacttatataaaagccggcaaaatccccacaccccgcttttatcgcaatgttttcacatctgacatttcaattttcctgctattaactggtaacataaagcattgaaaatttccatgtctttgtcgaaaaatgcgaagtggtctgccctcttcaaagtgatacgcaccgataaaaaatatgctgtggtgtcgtatttacagaaatataatgctttgagttaattgtagcacagaggaaaagacttgtcattatctttttgcctcttcccggctattcttcaaggtagatgcagctccctctccggcaaaatattccttcaccagctttacaactacacccgaaagcaaaaataccgcgataaggtttggtatgaccataaggccattgaaggtctccgctatgctccacatcagtccgaggttcattgtcgcaccgactatcgcaacaagcgaatatactaccatgaacagcttatttgccttagttccgaataggaactctatgcatctggttccgtaaagtccccagcctatgatggttgaaaatgcaaaacagcacatggcaaccgctgtaaagattgatacccagccgccgtaggtggatgtaaatccgctgatggtaagctctgcgccggctgcttctccatagcccacagaaactccgctgcagagtatgacaagtgctgtgagtgtacatatcacgatagtgtccacaaacacctcaaatatgccaaagaagccctgctttacaggctttttggtgtctgcacaggcatgcgcgatagagcctgttccaagacctgcttcgtttgaaaaaattcctctggaaacgccctttttcatgctcataaaaaagcttcctactgctccgcctgtcactgctgacggattgaacgcgccctctattatggctccgaatacgccaggtatagctttaaagttgacgattactactccaagtgccagcaaaatatacatcactgccataaatggcacaagcttttcagtaacctggcctatacgcttgattcctccaagcagaataagcgcaatgagagcggcaagcactattcctattatgagattgaacgttgatgccgactcttttgaaattatatcgtaattatataaagctgaatcaatcgctgtggttatggtgtttacctgtgtagcgtttcctgtaccgaacacggtgagcacgccaaacgctgagaacagatatgccagccagtgccagtgctttttaagaccgtttttaatatagtacatagggccgcctaccaggtcgccgtttgcatttctctcgtgaaaatgtacagcaagtgtgacctccgagaacttggtgcacatgcccagaagtgctgaaatccacatccagaacaccgcacccggtccgcctatcgcgatggctcccgcaactcctgccacatttcctgtaccgaccgtcgccgcaagtgccgtacacactgcctgaaacggtgtgagcgctccgtcggatgcctcacgttttttgagcatcctgccaagcgtaaccttcatcgcatatggaaactttctaatctgaataaatcctgttctgaagctcaaaagcagcccgacacctatgatacatatcatcgcaggcacgccccagataaaattgttgaccacgtcattgactttttctattactgataacatctttttctcctactgaatttagtgtaacgtataaagtataacacggtttgtacaattttttatatatttaatttcatttttttgaagtttttctttataaaaaacacccggatatagcaatttatctatatccgggtgtttatttttgtataatatatacaggatatccctctacagtccctgtgtcatcttgtaatctataagtgtcatgagtgattctgactcgatggcgagctgctcacactcctcaatccacttgtcataggcttcactcgcctcatcctccggctcctttgcttcgagcgcctccatcatggcattgacctcggcaaattctgccttgatatcctctaagagagagtcttttgttgatttcatagtatcctcccaatttgatttaacgtaaaatatatttttatgattatttcacaaaaatttcattctataaagtgtggctcaagcatctcaagctctgccacatctatgcagtttggaatcgtgccgtttatcacgtcctgcttacactctgcgtagtcaaaccactttacagagtcgatttcctccttctgcacggtgatgtccgcttcgtccacatcgagccacagaagaaacaccttgcttatctggttgtccagaaatctttctccgtgaaacacctcgtctgcatggtgcctgtgcagtccacagtcgataagctgtttgggctctattgtcagccccagctcttcattaagctctctgagcgcagacggtatgtagtccacaccggccggtatgtgtcccgcgcttgatatgtcataacagcccggaaaggagtctttttccatgcaccttttctgtaaaagtatctgtatggaatctccgcggtgtctgactatccagacatgcgcagtcctatgaagtatattgtttctgtgcgcctgcttgcgctctacggtctgtcctgttggatttccctgctcgtccactatatcaaaatattccatatgagactcctttcttgtcgcttacgtccggatcactcgataggtgctcctgccggcattggtttctccggtgtcaggagtgcgagattgccctctgcatcctctgcgcacagcagcattccctctgataaaacacctgcgagcttagccggttttaagtttacaagaaccattaccttcttgcctaccatctcctcaggagaatagtactttctgatgcctgatactatctgctttgtctggtttccaatccttacctgtgagcagagaagcttctttgacttcgcaactgcctcacattttacgatttcaccaacctggaactgaagcttttcgaaatcatcaaatgtgatttcttcttttgcttccacatccataggctcaagatctgcaccatctgcggcattttcacctgcaccacagccacatgctgccttaccctcaactgcagcaagcttagcctgctcagcctcaaactctgctttctgtaccgcctggattttctctacctcaggcatcacatcctcagcctttaatctgccgaagagaatctcaggtttgtctgtaacctttgtgccgctctcataaagaccaaatttgtcaaggtcatcgaactcacggagtgttgtgttaagctgtgccacaatcttttctgctgtctccggcaggaatgaatgaagcaggcttgctccgattgtaatagactctgtgaggttgtaaagcacctcagctagacgatcctgctgtgcctcgtcctttgcaagcacccaaggtgttgtctcgtcgatgtatttattgcagcggcggaaaagtgcgaatacctctgtgatggcatccgccacacgaagtccttccattttctttgccactttatctcttgtgccggtaacaacagccttaagatctgcgtcaatggcaatttgatctgcatcgcctgttgcgcctgtgctctttacgatgccgtcaaaatacttattgctcatggaaactgttctgtttacaaggtttccaagtatgtttgcaaggtctgagttgaatctctcgattacaagatcccatgtgatgattccgtcgttctcgaatggcatctcatgaagcacaaagtaacgtgtggcatccacgccgaaaagcctgaccatatcgtctgcgtagataacgtttccttttgacttactcatcttgtcaccgccctgaagcagccatggatgtccgaatacctgctttggaagcggaaggtcaagtgccataaggaaaataggccagtaaatagtgtggaaacgcacgatatcttttccgataaggtgcagatctgcaggccagtttttcttgaaaagctctgatgatccgtcaggatcgtaaccgatttttgtaatatagtttgtgagggcatcaagccatacatacactacatgctttggatcgaaatctaccggaattccccagctgaatgatgttcttgatacgcaaagatcctgaagtcccggaagcaggaagttgttcatcatctcgtttttccttgaaaccggctggatgaaatcagggtgtgtgttgatatagtcgatgagtctgtctgcatatttgctcatcttgaagaagtatgcctcctcctttgcaggctgtacctcgcgtccgcagtccggacattttccgtcaacgagctgtgactctgtccagaatgactcacatggtgtacagtaaagtccctcgtatgagcccttgtagatgtcgccctgatcgtaaagcttcttgaagattttctttacacatttctcatggtcctcatctgttgtgcggacaaaattgtcatatgatgaatttaccatatcccagattctctttacctcacctgaaatctgatctacaaactccttcggtgaaattccggctgcctcagccttttcctggattttctgtccgtgctcatctgttcctgtctggaaatatacgtcgtatccctctgctctcttgtatctggcgattgcgtctgcaaggatgatctcatatgtgtttccgatatgaggcttgcctgatgtgtacgcaatggctgttgtcatgtaatatttacctttgtttgccaatttagtttcctcctgtttttaatgcttcgcacatatagtcttctataatgccgtatcacatacagtatattcctcagaaaaaatactatatttatttcctcagaacaactgtatgctctccggcaattcaatatattacgtgcgaagccgtaataataaaacaaaacgcctcctcaggagaaaactcccaagaagacgattatatcgtggtaccacttctcttcacgcaactatcaaaatcatccggcatcttttgccggcactgctgcgcctctttccgctataacaggcggttcctgtcagtatctagccaatggttcgatactgctgctccaaagccatgttcctcctactttaggtcatcccctctcagcctgtgtgggatttctctgtaaatctgccataaaagtactctctttttcgtcgcttttatctcatacattcctagagtagcatgtggcttttaaattgtcaactgttgtaagtcaacaagaataagtttattgcaaataattaactttcaagtaaattactttgaagttaattgttgtgccttattcaaaccttaccgataaactgtacatatattcgttgtttccgatagatgccccgggcattatagcctcaacatgatccattccataactaatcctcaaaagctcaatttcttctccttttactatatctacatgctctttctcatctgcccatgcgcacatatatccggtcagctccacattatcttccattaattcaaatgtagccttaccctagtctactgttacacttatccagtcatttttttcattactatcattttctgatgaaaccttaagcacactgtctacagtatttgccctatctgaaacattacccgacttaaaaccatatgtcatcacatcatgtttatattttttctcaactttttcataacaggttatcatatctttttcattttcaatatcccatcaactttaagccgattttctacaacaccttcgaaccatttgccgtaagcttaaaagttgcacctagtacctctgctgcgccacgacacatcatcattcgacctaagaaaatttcaaaatactcatacatagagcagattttcgtatcaatctgcagattaagcgctatgacttttttatccatatttatcttaagagctgcatctgttactgcataatttaccctgtcgtgtatatcaaaattttcttttgccttgttccttacacggtttctgcgcacatcggttttatctgctatgatgagtgctgctgaaataggatccgttgcccctccggttgactcatcatgatgtcctatcgcagacacaaccgttatcctatccttcagactcatatctgtttctttgagtatctcgtttgccagtattgcaccatattccgcatgacggcttctgtttaccacatttccgatatcatgcataaatcccgcgatttttaccatttcaatatcagattcgctgtaaccgaatttctttaatatatatgctgctcttttggctaccattgtgcaatgagctgccgaatggtctgtaaagcccaatactccaaggttttcattccctttctttaaacattcacagacctccttattcttttttatctcatcgtatgtcaaattattgcctcctgttttgttacttaatcataaattatagtctgcttttcataaaaatattcgtacatgttttgtaatctttatttctgcacttataagcataacaaataattgaaaatatattgaggtggctgtgtaaaatttgtgggaaattttctatttactattgatatattttgcattgacattttttgttgcatattttcctcctttatgcatatatttgactaaaaaatatgcagatactcaataagtatctgcacattttctaagtaatattatgcattaaaggttcaaaaggtattttaccctatcgtataataatatacgctgtatatgccgcatacattagcagcatgatgataccctcgcctctttttatctcacgttttgtccatgccataatccacacgatgagtgaaaataccacaagcacgataatatctatgatattttcctgtatgaatgctatcgggctgatggctgatgcaattccgagcaccatgagtatgttgaaaatacatgagccgacggcatttccgagtgccatatcgacctcgttttttctggctgcgactattgatgtcacaagctccggaagtgatgttccgatagatacaatggtcagtccgacgagtgtctggctcattccaaggtcaatcgctatgcggcttgcactgtctactacgacatctccgcctactgcgatgccgacagctccgattaggatgaaaatcactgcttttggcattgagatgagaggtatctcatcgacctcctcatctgatgactgcctgttctgctttaatgtgtgtctgataaggtagaaaatatatcctgcaaagcagccgagcagtattattccgtccactctgccgagtatcatgccgattgttcccattacaagaagtaaaatggcacatatcatcgagaatgggaaatccctttttaaggatgctccgtccaccacgaccggtgtcatcaaagcgcacacgccgattactaccatgaggttaaatatgtttgagcctgtcacgttgctgactgcaagcgtattattgtgtgctatggatgctgccacactgaccgctgtttcaggaagtgaagttcccatcgcaacaattgtcagtccaatgataagtgacggcaccttgaagcgctttgccacgcttgagctgccctccacgaacatgtctgcgccctttaccaaaaacacaaagcccactatgaggcagagcagcaccactataaacggtgcattattgatgaaattttccatgttgattcctccgttttttatttttgtattctatattatttcatttcttatagtatctgaaatgtaatcccagccacagtttatgtcatatcataacacgctcattaaaagcttataatttccagatgctcaagcaatatcttcacgcctatgagtatgagaatgattcctccagctatctctgatttctttttatatttattgccgaaaaagtttccgactatgactccgatgattgagagcacgaaggttgtaagtccgatgattgtaatagcccagtagatatttaagctgtcataggtaaatgcaaacatgattccgactgcaagcgcatcgatgcttgtcgcaattgcaagcagaagcatctctccctgattgagcgccaggtctttttccactaccgcgtcatcatccttttcctttactgcctcataaaccatcttgccaccgataaagcccagcaggatgaatgctatccagtggtcaatgcttgtgatgtacttctcaaagcgaatgcccagcatatagccgataaacggcatgaacgcctgaaatcctccaaaatacagaccgattgtcagcgcctgctttctgtttacctttgtcattccaagccccttgcagatggatactgcgaaggcgtccattgacaaacctactcctataagcaggatttcaataaataataccatatttttctcccttttgcctagtgtgcggcgattaatttctcacggataagcatatgaaaaaatgagaccctcgcatgcagacacgaaaccttataaagctataattatatggcttatatagctttattgtgtgctgcatacttgagtctcattctttaatgtttgccaggtctattgaccggtctgttgacaaaccacgtatatgtaatgatacgcgaactactccctcagaggtagtgtgtatttaattaatcgcctttgcttctaaaaaaatatatcaaatgacatgggctgtgtcaatgtattttaccgctaatctttgtacggaatggctaactttttaaaataatcgaaactacccggaataattttttacagaataaatttttcagaacaaattatgcagaataaattattttagaatcactgttgacatgaaaaacaacatgtgatacatttactacgacagacatagtatgacactcgtagtatgtcacacgtagtatcaattaattttaacacgcctgatgtacaacctttcatctgtgtatcaggtcttatattaataaaatatgaacatcatgatgaaataaaatacttaaaacaggaggtgaacaatggtcaatataagcagcgatgtcatccgcggatacaacgataccatcatactctacctgctcctcgacagaccttcctacggctacgagatttcaaagcagataaggctaatatccgaggaaaaatacgtcataaaagaaacaactctctactctgcatttacccgccttgagaaaaacggttatatcacatcattctcttcgagcgacaatgcaagcggcaaaaggcggacctactatcagattaccaattccggcagagaatattacaggatgaaatgcgaggaatggaagctgacacttgatgtagtaagcaaatttatacgattttaaaggagacattttatggaaactataaagaattatctggaaaatatgttttcgcacctcccgaatacccccgaggtgcaaaaagccaaatatgagctctatcagatgatggaggataaatacaacgaattaatatccgagggcaaatctgacaacgaagccataggcatagtcatatcagagtttggaaatcttgacgagcttgctgactcactcggtatcaagagcttcgtgaatcccagtcaggcaatgcctgcttccaaaacactctcccgcgagactgctgtcgcattcctcagggattcggcaaaacaagcatatctcacagcgtttggagtgctgctttgcatcctcgcaagccttggaccgatattcagcgaatgcattccgcgttcactcgcttcacctgacgcatctgatgcaatcggcattaccttcctgttcctgtgtgtcgcagtggcagtcggcttcttcattttttcaggctctatctcatccaagtggagctacctgaagcaagagccttactgcatagattttgagacggcaaactgggtcatcgagcgaaaggaaagctaccgctccacacatgcgatgcttttaacagtgggtatcatgctctgcatactctgcgcagtgccggcaatcataatcagctcactgaacacccaaagcaccttcgcagactcactttcaggcggactcgtgctcgtgtttatagcaatcggtgtattcatgatagtattcacaaacatgaagaaatcaagctttgacaagcttctttccctgaacggagcacagactatgggcggtaattttgccaattcacacgatggcaaggtgcactatgaaaaccctgttgtggctgcaatcatgtcagtctactggtcaactgtcacatgcatctatctatgctggagctttattacctttgactggggtatcacatggattatctggccaatagccgcaatcatcaattcgctggtggaaaatctgctcggcgataaacatggaaattaatggaaaccaatacagtcaaaaatgtgtgtagcatattttgaataatcacaaaacaaattatgcaacaagataattcagaaatggagacaagtcatgaaaaagaatatatatctaataataattacaataattacagtggtctgcatcatcgccgggagtctctaccatatcgggggctttgccctaggcctgtttgacaatctgattccgcgctcagacaagtctctcggaaacgtatgcacagaggagctttcagtcgatgaattttcaaacctggtatttgatacaaccatatcgaacatcaacgtgaaaatcggtgacagctacatggtctcatacaaatgcaacaagcgactggttccaaagattaagagctccggcgataccctcacaatatcccaaagcaaaggagccaactacagaagaaacaccacgagtgaaatcactgttaccattcctgagggcgcagcattgaacaagctctcccttgataccggcgtaggcgaggtaaaccttaattccctgaccgcagccgatgcagaatttgacaccggcataggcgatttatatgtcacagactgcagcttcgccacatgtgatgtggatggcggaaccggcaatcttagctttgaaaactgtgcctttgacgaaatggatatcgacggcggtacaggtaacatcactgtgacatcctcacagtcacttgacggttacatgatggacctggactcaggtacaggcgatatcacaatcaacggcaatgactatgatgatgagtatgaggtaaatgagcatgccaaaaagcacctggttatcgactcgggacttggggatattgtggtgaaatattaaattaaacttttcactttttattgtccataaactgcggctccatatatccggttcctgacatggacttgtagtagcggcttgctgcctgcgtgccgacacgcacctcgcgggcctgcttctttatggacgcaaatttcagagtcatgagatccttgttacgggcctcctgactctgtatttttacgctcttgtccgtgatactgcggatatgctcctgcatggtgcgtatctgctccttgtagtcctctttgtgaccattcagttcttcctttgtacgttcaaaaagcttctcaaagcctgagtctaaattattgagctggtcgataagcctgctctttgcctcaaccacctcgtcaaagtcgtcaggtgtaagctgtggatcctcgagctggttcttctgcttgatatcaagctctattatccggtcgagtacctgctcctttttctccaggctttgtatcattatatctatgtatgtctgttccatggtgttctccctgtatttccaattgttttaactataagcatctctataatagcacaaaacgcacaaacaaactagcttcatgctgctgtctctgcgttttgtttaagttaaaaactctctataatccctgtcggtgatttatgatacatttatctatgacacatgcagcttatttccgttgcatgtggcctgcatgacctctttccacgcgtcacgcatagtgcgcaggtgctcaagcacctcctcaagaatctccttgtccttctttatgtttgcctcgacaaggcgtctgtgaagataagtatatacattgttaaaatcctttgataccggatatttgtcatcaagtgtggactggaactcctctatgatacgctcaaccttgcggatatttgtatgagcctgctggatatcctccttctccactgccataatagcgatattgcaaaatttgattgcaccatcatacagcatgagtgtaagctctgccggtgatgcagtcatgattttgttgtttgcatatgctgcgtatgctttattttgtaacataatataccctccctggtatctttttatgagaagtagctgctaattgagctctgtgtgctgttgagcttggtcatagctgactccatctgagtaaacttgttgtagtagtaatcctcacgatctgagatttttttctcccattccttaatagtcttggtgtagttagtgtactctgtcttcatctgcttgtcattgtagatggtaaatgctgagctcaaatccgtagacttcatcttgtcaccgattgcactatacagattagttgaaagctgctgcataaactgcattaccgtatccggatcatcgtttatagctgccatgagcttatctgtcttgccggatgtattggcgtcatcctcatcaccatcaatgtgatatgcattctgctcattctccgctgcattcaaaaatccaagtgtactgattccaaagcttgagagcgagtacttcttgccacctatctcaactgatgacatcatggctgtctgcattgctgtcattacgctgccaagtgtagaatccctgcgaagcagagagtccttaatctttgtctcccacttctcaatctctttatcagacatctgatccttctcatcatccgtgagtggctcgtagcttcctgctgaatcagcattgtatagcttcgtcatctcgttgatgatgttgttgtactctgtcaggaaatcctttaccttatcatatacaccctgtgtatctgtgcttgttgtaatgcttatagcactgtcaccggtctcagcaagtgcctcgattgtcagtccattgattgaatagctgttgctgtcacctgtatattttacaccgttcagctcaatctccgaatcctgtcctgcgaccttcttcacctgtgaattgaaaagtgccttattctgaagcgtgtatgcagtgtttaccctgtcgagcaggtcgtttagcgcctgtgtatactcagacgaatccttctgctttgaggcaagctcctttacaatattgctatctgctgctttttttgtgttggcctctgcggcctcctccaaagcgtttgctttatttacaaagccgtcagtctcgtttccgtttcctgctaaaagctgctctacggcttcctttccattgcctgcataagcattctgaatagccttggtgaggcttgcaaccgagtacttgtcatcgcttcctagcacttcgtcctttgaattctcaaatgcctgaactgacgcaagagcctcatcgtatgagcttttagtcttttcatccattgacttgatgattgtgtcatacgcttctgaagctgactctatgccagtcttgtttacggcatctgccgcaatagtgtactcggtcttttgtgaaacagtgatggaatcagttttatcagctgtgccatcttccttttgcagatagtacttgccgtctgcctcgtcctttttgtaagtcttatcaccgactttcagtgttgtatcatcgactactgtaggtactgcttcaagctccttgccatcagcgtccgtataagctgtcctcgtagattctgtcacatcatagtacgatgtggtatccttgtccttatcagcaacggctgcaatatagtggctattgttgtcgctgtcaatatacttatagagagtatttccatttgtatcggtcagtgtggtctttgtatatgtatcatagctgtcaccattctttgaaatcactgcgccatcacgagatgagccaagcttctcaagcagcttcagcttatcactatctcctgcattgtttgcatccagcttctcataaatgccctgaagtgtggcatatgaatagccataatttacagcattcataagatttttgctctgcgcattcatcttcgccgcatctgttgtcagattattgtagtttgtaacagctgcctcgattttggctctggtctcatcgtctgaaactccatgtaaagttgcatactcatcatatggattggatgaataagtaccggtagtggtcttttcaccaccatatgctattcccaggctataaagtgctgatgctccatctatattgctgccggttatggtaaaatcgtttgccacgcctgtcttttttgagctgatataaaatctcttgtagcttgaatcgtagtttgcatcaagccccgcattcctgagttcctttaccacgtcgttcatggttgatgatgcgctgagagtgatggacttggtctcgtcccccatctttacctcaagcttggcatcaccgcctgtgtaaccgagctgtgcaagtgtagtcttctcactgtctgccttaatttctgctccggtcatatatccggcctttgccatctgcttgattttcagcgactgtgtgccgcttggtgcaccggagcctgcctttactgtggccttggtagtatccgaaactgatgtcttctttaagttgtatgctgtagaaaatcgcagattggaaatattgctgtacaagctgtacaccttggtattaagggatttccacgcatcctgtgtccactcaagcttagtctgcgccttctgatatttctcttttctggtggtatatgacgataccattgcctttacaatagaatctgtatccagacctgatgtcattcccgataatctgattgccatggtgtcctcctatctcttctcatctaccatgagtcctgccatctcccagaccttcgctatcatgtcgagcgtcttctccggcggaaactccttgatgacttcctttgtcttcttatcaactatctttattgtcacgcggttagtcttctcatggatgccgaacactgcctccgactggtcagccaacgcgctcttgttgatatcatccacagcctttttaagctgcatattcttctcattctgcttttgtgcggcaagctgtgcctgtccctgcgctccggcatcaccggctgaatcaccgcttgtttccttagtattcatcgcctgaatattccttgcgatgctgtcagacacgacctgattgtccgcactggacacctctgtccttccctgtgcctgttcctttatctgtgcagttgatgtacttccctgatagaccattcctgcacctttgattgcctctattgccatctctaacacctccgtgtgaaaatatgttgcaattgactgttgttcttaccctattctaaggaatatatcggatgaattgcgggaaagtttatagctttcttctctttttaagtataaagagattttgaaaaatcccggcccacatcaggatacttaactttatcctatgacgcaagccgggatggattgtctctttattctttttgtgttttagtcttaatgctccagattcgcaaacttcgtgtactcaggcagccatgcaaggtttacggtgccgattggaccattacgctgtttagcgatgatgatctctgagatacccttgagctcggtgtccttgttgtagtagtcatcacgatagatgaacataacgacgtcggcatcctgctcgatagctcctgactctcgaagatcagaaagcatcggtctgtggtctggtcgctgctctacagctcgtgaaagctgggagagtgccactacagggactgaaagctctctagcgagtgccttaagcgaacgtgatatgtctgagatttcctgctgacgcgattctgagcctcgtcctgagcctgtcatgagctgcaggtaatcgatgatgacgagctttaagtcatgttcgagcttgtatttacggcacttgcttcgaagctctgatatgctgatacccggagtgtcgtctatgatgagctcggagtctccgatgattccggctccctcgaccagcttttcccagtcggcatcagacagatttcctgtacgcagtgcctgcgcatctacctttgattcgagtgagaacagacggtttacgagctgctccttcgacatctcgagtgagaatatggctgtacacagatgtgcgtgaaatgccacatgctgtgctatgttgagcacgaaggctgtctttcccattgacggacgagctgccacgagcacaagatctgacggctgaagtcctgctgtcctgtagtcaaggtctatgaagcctgtcgggattcctgttactgtgccctcctgctgtgctgctttttcgattttctcgagggcattcatgaccacagtacggattggcacgtagtcacctgtctgccttgtagaaagcagttcaaatacatcgtgctctgtcttgtcgagcacgctctcgagcgattccttgccggcgtagcactcgttctctatgtcctctgtcacatggatgagctttcgctttatggcattttcttttacgatattggcatagtacttgatgttggcagaagtcggcacactggtgacgagagttctcacaaagtcaagactttgtatttcctgcggcacatccttctcctttaaacggttctggagtgtgacgagatctacaggctgcccctctgtaaagagctcaaccatggtctcaaatatgatgccgtactgctgatgataaaaatcctccttaaggagcatctcgctggcggtcactatggcatccttgctcataatcatggagccgaccacggactgctctgcctcaaggctgtttggcattattcgtttgattaatgcttcttccaaggggattcctcctatccttcaactactgatactgtgaggtttgctgttacctttggatgaagcttgacaggcacctcatagtttccgagtgccttgattgactcgttaagctgcatctttttcttgtcgagctctaagccatgctgctcctttgccgcagccgaaatctccttggtggagatggagccgaaggtcctgccgccctctcctgagcgcagctttactactacctttgtgctctctacgacctttgcgagcgcaagtgcactctcgtagttttcctgtgctaccttgtcagcgtgctggttctgaagctttaagtcatttaggttctttggagtagcctctactccgagctttttaggtatgatattgtttctggcgtagccgtcactcacgtttactatctcgccttttttgcctaatggttttacgtcctgtaataagattactttcattcttctatgtctccttcttttagcatttcgtccagtgtatcctgtatcatgcgctttgcctgcacgatagtaacgcctgtcagctgcgcgcctgccacatttaagtgtccgccaccgcccagcttctccatgattatctgaacatttatctcgtcgattgaacgagagctgatataaatcttgtcattgtactccgtgagcacaaatgatgccttgattcctattatgttgagcagctcatttgctgcctgtgcaccgacgattgtcgggctctccacattctcgctagggcataccgatatggcaaacgagcccctgtatacctctgcatggcgtactgcctcggctcttgccttgtagcatgccatgtcatttctaagcatctttctgacgcgtgttacctctgcgcctgagcgcttcaaaaaggctgccgcctcaaatgtacgcacgcctgtctttgtcataaagttgttggtatcgatgaggatgcctgcgtagatgcagtcggcctctgtcgcattgatcttgactccgtcgttgaagtactgcaatacctctgcaaccatctcacacgcacttgatgcatacggctcgatatatgagagtataggattctctattatctcgctgctttgtctgtggtggtcaaatacgactatctttcctgtctttctgaggagctcaggacactctgtgtagcttggcctgttggtgtccaccaccatgacaagcgtatccttgctcaccatctcaagagcttcttcgctgtttataaacatatccgcagggtagccctttgcctctgaaaatgtctccataagaggtcttactgagcttgtcggatcatttatgactatctgtgcctttttgtcgagattcttggctgcacagtatatacctatgcctgctccaagcgagtctacatctgtgatgctgtgtcccatgataagcacgttctcacaggtctcaatgatttcctgaagcgcctgtgccttgactctcgcctttacccttgtcttgctctccacctgctttgacttgccgccaaaatacaggatatcatcgtgatcctttataactacctgatcaccgcctcgtccgagggccaggtctatggcatttcgcgcatatacgtagttttcattatacttatcgctctttataccgattccgatactgagtgtgaccgccatctcgttgccgacctttatagccttaacctcgtcgagcaccttgaacttgtcctccttcatgctgtcaaggtacttgtacttgaacaccacgaagtatttgtcgttttctatctttctgacaagtccgtcatacttggcaaaatactggtttacacgcctgtcgataagtgcaacgagcagtgacctctttacgtcctctatgctgtcaagtgcctcatcatagttatcgatatacacaagcgctgagacctgcttctgctctgtgatttctttcttgcagtgataaagctccgactcatcaaatacgtacagcgccgtcaaaaactggtctgcttcatttgtgtcgattatctcattttcctctgcgatagagttgaaatatattcgcttgacggacagacggactatgctgtcctcctcctcatttactatcttgaagtctgtcggcgcatcactcttggtgagaagctctctggtcactgtcggaaaaagtgtcgtgatggatttgtgatattttttatccacacccattagctctgcgaatttgtcatttacccatagtatcttgccggagtattcaagcagggcatacggcacctcaaactcattaagcagcctcttctgcaccgatgaatactgtgttgcaaagcttatcagctcatttgcaacgactgacttgcttctgacatacaaaaacagcacgagcgcaaagtaaaacactgtaaagcctaccatgccatagccaagccttctgtcatagcgcagtgctattccgtcagcacatatccacacaaacgtcagatatagcggccagcacatgtagcttttcagcctgcccttgaattttatttttttcttcattttactctccttatccccgctgcgttgcgctgatgctgccgatgcaacggttgcggtttcgagaatgtactacaaattaatagttaccggccacacctttgtgcagcccgcatcgattgatatacctactagagagtataccactttgtggggattattcctagtactatatttatcagttatactcaaatcgttgctgttcacactgttaggtgtgaaccgtaacttatactcagttatgattatgaagaatatatggcatttctgtgtatcagagataatcttaatacaattctgtgcaatctaaaaagcaccgcatatatctgatattgatacgatacatgcgatgctttttgtgtgctctcatcttccggtattcattttaactaaatataattacttctcagtcttatccgcagctatctctgcaattgactttgtaagacctgcaatcccctgaatctctgatgggatgattatctttgtagccttgccgtctgctgccttggcaaatgcctctaagctctttatctggagcactgcgttatccggatttgcctccttcaacatgcgcagtccgtctgcattggcctgctgtatcttgaggatagcctctgcctgacctgctgcctcctggattgttgcctccttctttgcctctgcgcgaaggatggctgcctgcttttcagcctcggcatcgaggatgactgactctttatttccctctgcaacaaggattgttgattttttctcaccctctgcacgaagaatggcctctcgtctctcacgctctgccttcatctgcttctccatggcatcctggatggcctttggaggtatgatgttcttgagctcgacacggtttaccttgatgccccatggatctgttgccacatcgagtgttgcgcgcatcttggtgttgattgtctcacggctggtgagtgtctcatcaagctctaagtctccgatgatgttacgaagtgttgtggctgtgaggttctcaattgccatgattggattctctactccgtatgcatagagctttggatctgtaatctggaaatatactacagtgtctatctgcattgttacattatcctttgtgattacaggctgtggcgggaaatctaccacctgctcctttaagatgactttctttgctattctgtcgataaatggcaccttgaggtgaagtcctacgctccatgtggtgagatatcctcccaaacgctcaattaccattgcatgtgcctgtggcacgattttgatgcagtttaccagtactataagtacgattacgagtaacactgcaagtgctattaatccttccatttccggttaagcctcctttaccctttttacaattagttttactccgcttatctttactacctcgataagctcgccttttcttatgacctgggtctcgtcctgcggtctgactgtccactcctgaccgtttacaacggcttttcccgtctgcttcatgctgtcagcatcctcggtgagcacagctctttctccgaccagactgtccacgtttgtcttcactgtcctggaattgatgtacttcccggcccatggctttgtgagagctaaaagcacaactgaaacgagtataaatgcaattccctgaaccacgacattgccgccaagcagtgcgattataaacgctacaaatgagcctgccgcaaaccatatggatgtgagcccgactgtcataagctcaactaaaacaaaaactacggtggctgccaaccagaaaacaatgtatgtatccatttgaaccctccctttttattagtatttgttttatattcattttatactatgtaatttgattatgcaacaaatattaattttttaaacataaaacatttttaacctaaaaaatcccgaccaccatccggtagtcgggatttatcatacatttatcttattcgcaaacgtatggcataagagcaagatgacgtgctctcttgattgctactgtaagagctctctgatgctttgcacagtttcctgtgatacggcgtggaaggatttttcctctctcagagatgtatctctttaatttgtttgtatctttgtaatcaatgacattgtcttttccacagaatacgcagactttttttcttctacgcattggtcttctcttcattgatgaaccatcagctgatttattgtaagccatttttgttacctccttgaatatttgtcctcgtggacactactaattgaatggaagctcctcgtcgattccgtccggaatgttcatgaagccatccccagcagcctggctaggtgcaggtctgtctgccggtgcaaatccgcctgcatttcctgatgcggctgatttagactctgcaaactctgcattctcaaccacgacgtcagtggtgtataccttctgtccgtccttgtttgtatagctgccggtctggattcggccttcaacaacaaattttgttcctttacggccaaatctctcaaaaaattctgctatctttccaaaagctacgcagttgatgaaatccgttgactgctcctctgcattcttgctgtatcgtctgtctaccgcaagtgaaaatcttgctattgcaagtgagttgtccccctgggcatagcggatttctgcgtctctggttaatctacccataagtattactttgttcataatacaatctcctattttcttatactatgcctcgtcttttctaacgcataagaaacgaagaacattgtccatgatacgaacgtcctgctcgatttctgctgggactgttccctcagcatcgaactggatgaagtaataaaaggcctcagtcatgtgctgaatctcgtaagctaatctcttcttaccagcctcctcaacttctgtaacagtaccgccggcacgtgtgatgtactcttttgccttctcgactactgctgttctcgcatcatcctcgatctttgcactaacgacgagtgctaattcatatttgttcatgcgaatgttacctccttttggtctctggctcataaatctgattatgagcaaggaattttatatcacgagtctagataataacatgaatcgtggtacttttcaaggggtttttgcatttttctttatttttttattaggtcggaacgtgcgccgcggacagggggagggcacaggcatacttccgcgtgagctacgcttcgctgctaagtggctgtacgaattgtgattttggttttctatgcctgacgaaaccgtcgctactcgccatccatggctcgatagctccttgccccggcttccatgccggggcatttctgtgcttcgtagcacaattctacagcctctaagtagcttcgctatgcgctcttgcgaaagtatgcctgtgccctccccctgcccgcggcgcacgtcccttactctgtggctgaatttagtttatataaaaagacgaggtgcagtaaactgcacctctgtttttactattctactttgtttctatataactaagcctgcttcttggtgagaccgcggtcatttttctcgaccagcttccttggcaccataacctggtgtccgcagcccatgcatttcagacggaagtctgctccgacacgcatgatttcccactcgctattgccgcacggatgtggttttttcagttttacgatatctcctactgcgtatttatccattctatattcctcttctacctatgcctgccatttaatatgctgtgtattatcctctgtttacacctctatctgctcaaatacagagcccagtccctgctgtatcagaaggtctgctcttgcgtccatcggtgtggtggacttgttgataagcacgagcttgtttccgttgtaatagtctatgaggcctgccgccggatataccgcaagtgatgtaccgcctactatgagcacatcggcgtgactgatgtagtagattgcatcctcaagcgttttctgatttaagccctcctcatacaatacgacatccggctttaccgggccgccgcactttgggcattttggcacgtctgtcgagtggaggatttcctctgcgcttacaaactgcaagcacctctcacagtagtttctcagcacactgccatgcagttccatcacatttttgctgccggccttctggtgcagtccgtctatgttctgcgtcacaacacccttaagctttccggctttttcaagctctgcaagcttgtaatgcgtgatgttcggctctgcatcaagacagagcatcttgtcacggtagaatcggtaaaactcctgcggatgcttcctgtaaaatgtatggctcaggatggtctcgggcgggtaatcatacttctgattataaagtccgtccacgcttctgaaatcaggtatgccactctcggttgatacacctgctccgccgaaaaatacaatattgtccgaagcctttatccactgcaaaaatgtttctacactgctgtcattgttacccatatgtatccatcctttcttcttttcttctttaaattgctgcctattattttttgagccacacttttatagctttcgcaccagcttgtccacatctgcattcagtccaagcaccatcactgcatcgtctgccttgaacacgtagtccggcagcggaagtacgcgattctttccggcttcctttactgtaacgatatttacattgtatttctggcgcacattattttccttgatgctctttcctacccagccttcaggtggatttatctcgtagattgagtaatcatcgtttaacgccacataatcaagcacatggttggcgctgtatttctttgccactcgttctgccatgtcgcggtcaggatagataacctcatccgcaccgtttcgaagcaggaacttggcatgcacatccctgtttgccttgctgatgacgtattttccgcccatttccttaacgagacttgttatctcaagtgagctctggaaattggtgccgatgcatacaaaaatcaaatcgaaattgttgattccgagtgcttttactacctgtgggtcggtacagtcacctatctgcaccttggtcacgtcatagattaaatccctgaccttggcctcgtccttgtccatcaccataatgtcatttccgttttttatcaaatccgcacacagatggtgtccgaatttacccattccaataattaaaattgatttcattgcgtttctccttatcctatgataactttttcctccggaagctctatattggctttatccggtctatgcacaaacgaaagcacaaaggtcatgcttccgattcttccacaatacatcataattatgataattatgcgtcctactgtatttaaatctcttgtgatgcctgttgtcatgccgaccgtactgattgcagagtatacctcaaacagtacatcgtccatcttcatattggatgtggcaagtatagctatcaccgctgtaagtccaagcaccagattgatgataagcaccattccggcctttttgattacctcactgcttattttcctgccaaacacattgcagccgttgcttcctctcagatacgaaacaatatagattatcatgaccgccatggttgtggttttgattccgccggctgtcgagcccgggcttcctcctatgaacatgagcactatagtcaaaagcttgctctccggtgtcagtgctgctgtgtctactgtattgaaacctgccgttctcgccgtaaccgagccgaataacgatgcaaatatggcacccggtgtatccatgcctgctatggtattacttttttcaaaaatatacataaacagtccgccgccgaagacaagtatcagtgtggttgatattactatcttggcgtggagcgagtatctgctaagcttaagctttttggttctgacctcattccatatggtaaaaccgataccacctatgatgataagcagcataattgtgatatttaccaatgggtctgcggcatattttgtaaacgatgagtactcctcgtttatgcccatcaggtcaaagcccgcattgcaaaatgcagatatcgagtggaacaccgagaaatatatgcctcttattatgccaaaatccggtatgaagcggattgctaaaagcaccgctcctatgccttcgataaggaaggttccccttattatcacgctgaaaagcctaactattccaccaatctcgagtgcattgacgctctcctgcatcagatccctctgtctgagtccgatttttttgtgcagaagcatggaaaatgccacaccgattgagatgaagcccatgcctcctatctgaatcagcaccagaattacaagctgccctatgatactccagtgtctgaaggtgtcaaacacaacaagacctgtcacacaggttgcgcttgttgccgtaaaaagtgagtccagaaaattggtccattgtccgtctctcgaagaaaacggaaggctaagcattatagcccctgataatattgtcagaaaaaagccaactgcgatgtatctgaactctgacaggttcttatgtcgtttttttatgtcatgttttatatcgttcatatccaatcctaactatttgctgcagaatgtattattgtcagcttacagaagctgtttgtatatatccctcttgctgacacctctgtcctttgccacgagcttcatggcttccttcctgtcgatgccctgtgactcatagtgtgccatatgcgcttcaagaggcatggcttcccagctttcctgctgctcctttgctatttcagccacgtttctgccacagatcacaagcacatattcacctcttggctcctgtgtccttgaacgctccaaaagctccgaaaatgtagtctgcaccttttcctcgtgctttttcgtaagctccctgcacacggtaagctctctgtctccgagcgcattgtaaagctctgtgaccgtctttataagatgatggggtgcctcgtagatgatgattgtccgagtctcgtttttaagctcctcaatgacacgcgcacgttcctttttatccctcggcaaaaatgcctcaaacgcaaacctccttgtcggcctgcccgacatggtgagcgctgtaatgcacgctgctgccccgggaagcgaggtaacaggcacgccctcctcgtagcagatgcgcacgatgtcctcacccgggtcagaaatgccgggtgttcctgcatcagtgatgagggctatatttttgccctccttaagctttgccacaagctggtaggctttatctatcttgttaaactcatgatagctcgtcataggtgtctttatctcaaaatgattgagcagctttatggagtttctcgtatcctccgctgcgatgaggtctacctccttaagtgtgcgcagcacacggaatgtgatgtcctccagatttcctatcggagttgcgcacagatacagtgttcctgtcatatgattctcctgttattttccgttattccggggcttatcgccgtatatctcatatatctcatccgtgtatacattaggctccttgtatacaactaacggtttttcgatggttatacggcttttgccgccctttagcccctctatgagcaccatgtttggctccctgtccgcgtagggatgcacaaggcgcattcgctttggctcgatatgatatttcatcatcgtgttaaagatctctgccagcctgaatggtctgtgaaccatgtaaaaacgcccattgaatttgagcatttttgcgctctccctgactatatcgtcaagtgtgcacctgacctcgtggcgtgctattgtcatggcatcatctgcatttttgataccgtgctgacctatcatatacggcggatttaccgtcaccacctccacggactcgcgcccgaaaatctccgatgcattgcacacatctccctcttctatggtcactttgtcctcaagatggttatatttcacacttcttctcgccaggtctgcacactgaggctgaagttcaagcccgctgtaatgctctccgttattttttgcctcaagaagtatcggaatcacaccgtttccggtgcacaaatccacagctctctcgccgcgctttacctttgcatagtcagataaaagcacggcgtctatgccgaagcagaacagctttggatcctgtatgagcctatagcccttgcggcacaaatcgtccagtcgctcattactgtgtatcagtgcttccattgtctttgtccctgttgtaatctttattatactctttattatagtttttgttcttgtaatccttgttgcggttgtatttctgcttgtttggtctgttcttgccgcccttgtacggctttttgtaaccgtccttattttctctgccggcatttgcagcatttacttcatttgtctcatttgcagaagcttccgctgcctctatgtccgccctgtacggacgtttttctctgttgtcacgcttatcacggcgctcgcgatattcatttttgttgtcacggtgtccacggtttctctgcggtttctcctgtgacttgtcctccatcgtctcatcgccgctatcctcgagatccttgagctcgcgaagctcctcctcggtgagctttacatcctttttctggcgcggctttaagcgcagatcatctacagtgtactcacgaagctccttctcctcaccgttgtcaatgacaacacgcacgagctgcctgagcacgctgactgacttgacctctccgattattccctcaggtgtcttgaccttttctcctaccgacggcattctgctgttcagatactcatatgtatcctgctcatacttgagacagcacatgagtcttccgcacacaccggatatcttggttggattgagggaaagattctgctcctttgccatcttgatggaaaccggcacaaaatccgccatataagaatgacagcagagcggtctgccacatattccaatgcctcccatcatcttggtctcatccctgacaccgatctgacgaagctcgattctcgtgcggaataccgctgccagatcctttacgagctccctgaagtcaattctgccgtccgctgtaaagtaaaacagcagcttgtttccatcaaaggtatactctgcatccaccagcttcatctcaagtccgtgcttgatgattttctccttgcagatggcaaatgcctctttttccttttccttatttctctcaaccgttttctcatcctcgtcggttgccactctgatgacaggcttaagcggtgaaaccaccttatcatcatccacctccttcggcggaatgaggacagttcccatctctatgcctcttgctgtctccacgataacatgcattgccatgtcgaggtcgaaatcagccgggtcaaagtaatatattttgcctgctgtcctgaatctgataccaactatttttgtcatgtgattagttctcctttatggtcataagcagcagctcaattaccaggtcaaaattaacgtttgcgttaattcttatcttcgccttctcaagtgcctcaagtattgcctcgattccctgataggaatgctttgctgcctgtttctttatatcatagacctcatccttgaatatgagtccgttaacatcgtttgtcgccttcatatacagcacatctctgtaccacaccataatcaggtcaaaataatcctgcaccttaagcttgtactcagctatctgctttaccgctgcacccagctcatagagatctatgtcatcgaggcgctttataagcgacagtgctgactcctttagctcgttgaactcgtctgatgaggcgagcttaacagcctttccgacgatgccctgtgcaaatgcggcactgatatctgcctgataatccggaatatgcttttcgttcatcaggtatgcctttatcacctcgtcctttaccgacttcatattgagtgtgatgcagcgcgacctgatggtctgcagaaagctgtctgcattggtggtgagaagcatgatgaccgcatatgccggtggctcctcaatggtctttaaaagcgcgttctgcgcctgctgattcattttttcagcctcatccactatgtaaatcttgtatttactgctgtacggttttatcactatatcgttgttgagctgtgtccttatgtcgtcaaccgatatgttgttgggcttttcatgactgacatatatgatatcaggatgattgtggtcatctgcctgatggcacgatttgcactctccacaaccgtctgtgccctccttctcacactgcagtgccctggcaaatgcctcggctatcatcattttgccggacagctgtggtccgtttattatatatgcatgtgagacctttcccattgatatggcattttgcagatgctctattatctgctcatttcctactatatccttaaatcctgccatagctgctgcctccgttttagtctgcctgtgtctgttatagcttttatctcctacgtgagtatatcaagcaacagtccacgtatctctccgattcttgccagtatggacagatgatccttctcatcctccaccagctctgatgccagctcgtccagattgctgtctatcagtcttattataccataaactctgtgtcttcctctcctgtcgaggaaattttctctggaaaatttatgggatctgtagaccacctcatttaaaaaatcctttatgagcccgcgatatcgcttcatatccctgatatccatatgctcggctattctgttgccctgtgctgtgatatcctgcatcagtgcatctacctttgcctggagatcagcgtctgttatggcgctggccagtgtgaatttgaacgagccgtcaccggcctgtgttttttgtgcatcaggaacctgtgtcacctgatttacttcatttactctgactgccatgaggctgcctccttattcgtttccggttacatttatgtgcaggctgtaaccatcatcttgctctgcaattaggaactctgtcgtatgtatgctgaaatctcggcaagcacagtgtccatatcatcatttatgaagcgacgtgtaatccccgcctcatgcagcttctcctcagagaaatctgatgcgtctgccagaaaacggcggcacatctcctcatatttaggcacctgctgccccttttcccggtgaatggcgcgtatcagacggtcgccatcctccacctccacatagattggcagtaccttgtcactgccaaaataatcgcgtatctttgtgtaagactccagtgttccgactgtcagatagcttttgcagcgaaggtctatatcatcatcgtttaccgtgaaatatttccacacgccgtacactgtattgtactctcgaagctctatgatgcgcccctgtgcactgagcctttttacatcctcttcattgcagaaatgataatccttatcctgtgtctctccgtcccttatcgggcgcgtggtatacgggataatcctgctaagcatgagggaatcatcctgcagtattttgttgtatatagtgtccttgcctgatgcgctttttcccatcacgcagaaaatcttacccatctgtaaacctcttaatattgtaattagtataaatatgattgtttgctatgtcaaactgttgcttacagcaccgcaacaaacttccacatattggcatccggatcaaagtacagaccgtccacttcaagacctgaatttacagcctttattacatcatctatgagcttgtcgttcattatctctcccggcaccacaagcggtatccccggcggatatatatttataaaggcaccgctcaccttcccgcttgccttaaaggcatagacctcctgatggtctgcatcatatgcatcatacatttccattacggcaggcagcttttggtatatggttgtatccattttgacaggaaagtaaaattgatgtaccacaccctcctgttttaatatatcataaaactcttcaaaatcagacttatatttttcgagctggctgtctatttcaatcaaagcatccgcaagcctgtcaaagccctcatccgtatccatgacagatgccagcgccagtacataattgcccgctgccatctcaagctgcagctcatattttttgagcagaagctcaagcagcgtatgtccattcatagcctctttcgtaaatataataatctttgattcgtcaaaatcatatgcctcgtcagcagaaaaatcactttttctgaccacgttcagatgcgaaagtccgctgaccttctgataaaatctgtcaagtctgctcctaagctgtgcaaaggctgtctctttattatcgcgcacatagtgtatgcagcgctctatgcctgtcataagcacatacgacggtgagcttgtctcataaatgccgagaaacttctccactgctccttcacacatcccacccagcagtaaaagcgccgtctgtgtaaatgccggaagcgtcttgtgcaggctcactatgaccgcatcggccccgagcgctatggcattttgagggaagccgcctccaaagccaaagtgcgcgccatgtgcctcgtcaactatgagtaaagctccatgtgcatgtgccacagatgcgattgccgccacatcggaaaccacgccatcgtatgtaggcgaggttatcacaaccgcttttatgtcgggattttcatcgaatgccgcccttatctgtgcctcggttatctgcccctgcagccctgtccgtgtaacttcagggtatgtaaacaccgggtgaagctgccttaagtaaagcgcatgatacaccgccttgtgacagttccttgctacaagcaccttgtctcccctttttgtggccgcagatattgctgccagtataccgcaggtgcttccgtttatgagaaaatatgcacgctttgcaccgtaaagtgccgctgcctcagcctgcgcctcctttataatgccctcagcgtggtgcagattgtcaaaattgtctatctctgttatatcaatagcatacgggtccagccctgcacctatatcactgccacggcgcttatgccccggcatgtgaaacggatatatatttgattgtgaattatttatcagttctttttccatttaagtacctatatatcctttttagcccagaaatcttccaagctccggcatccagtcatcataaaatatttcatcattgcagaacgcgctccagaccggtgtgaggaaatcaagtatcaaatcaagcgtctcctcccagcctgcattctcatatgccctctgctgtcgtgtcagcctcttacaataccgctcccagcgccttctcatataagcatagctgcgatagccatacacctgctcaagccggtgcatgctcactgtcttcggcttatttttcgctctaaccttaaaaatatcaattatctgccttccgctgaccgaatatctcttaagtatctcatatgcatcaccatatggtttcatatcgctaaccagctcaagcttatccattatctcaaacagctgttctccgagcctggattcaggcgaaaaaatacaaacatctgcgtctccataaaagctgttcataaaaacaatatttttagtcatgggaactcctgcatccgcttcattaaggcgctcaagcctcactgcaaacggtacttccccgccatcacacatagcgcttagattccacgtgtgtatcagcggctgcatatcactgccgtctcgttcattagctgatacctttgccgtctgcttagataattctgtattagtccataccacatcactgtgactgttaagccctgcattgcctataatgatattgcgcagtacatcaaacggcgtaccattatcctctgccctgccaccggggctgccatatacataataaaacgccagcttttctcctgttacaaaatacggcttttgaagccacagcacgtttcccagaccggcattatttatgcgccagagaaaatcctgcttcacgtactgccataacacatcgctgtacgataattttttctcatcgcttatatgtcttaaatctaccctcactacaaccatactcctatgaagctttgcaccttctttaccacgcgcctcgcccttgcgtaatccatgagcacggaaatatccttgtccgtatcagctatgtacgactgtatggctgccttgaaatcattgcggtccagtctcgactcatacttcaggcagtcgcatatcacacgctccttatcataaatgccaaaggtattaccgccaagctcaatggttgaagcaccaagcataagcgcatccggctccgtataaaacgggataattcttggatagtccatcttaaagcgtgattttgatgtatttttgtccacagcaagcgtccatccgtaaggtttttcctttatgtagccataggcgtaaagtgcactttccatgcaaagcatggcatccggaaagagtgctgcgacaagcgcatcctctgaaaagccctccacacggtctgtgtaatagccgtttctgatgcggacaagcttcccctccctgacaagctcatcaatacgtctgtagtctataccaagccttgtaagctcttcttttttcactattccgttgtgcttttccacggcctcagctatgatagcctgtacctgttgtatattcattaccgcttctccatcccttgcttatcggctaaaagcctcttcgcatcacgtaatccaagctgatacaagctctcaagcttcttaggatccttttctatcttgcttattttaatgtgctccgacggccttaacaccttagcaatgccctgcttttcaagctccttaagatgctcaagctgggaattgtacatgatatgtctgtttgaaaatgcctcataaaacctcggaaaacgctttttgtatacagatgtaaagagccttggcataggcttttttacatagtcggcaggctttgtcagcacgacaaccactctgtcatatcccatatcaagcatatgctcatatgggatactgtccgtcaccgcgccatccagataccactcattccccagcttcacaggctttgacactacaggcatagagcccgatgccctgagcacatccatctggtcaaagacactctttatctgcacatattctggcttacctgtcctgatattcgtcacaaccgcataaaatgggatatccgacttcttgtattcctcatcatcaaacgggtcaagttctcttggtacggtatcataggcatatttcgtgctcactatgtttttctcccgaagaagcggcctgatacccatataatttttgtcactgttaaatctcttattgtatcgtataaccctgccgcgctgctttgacagcagattcactccaaaaagtgctcccgccgaaacaccgataacagcatcaaagctaatatcatggtccataaaacagtcgagtactccggctgtatacatacctctcatggctccgccctcaagcacgagggcgcatctttcatcactcatttctgcctccatttataatgtcataataaaaaatgtattaatatttatgtcgaccgctgaacttcagattgtctctccttctgcgctgttttctctcaagcttgtgctccctgaagcgctcgcgctgctccttcttaatgctccatttgtgtttcaacacatatatattgtctgatattcttctaatcatgaaaatgctcagaataatcactgcgataagtacgagcacccagagaaaatataccggctttatccttattatatcactttccacgttctgtctgctgttctcatcaaagtacgacagatcgacctttgctcctgatttcagcagatccacacagcctaccacatgatcaccatacttgtatctgaccgtagcaagagcatccttgttgtcggacttcatgtcagcagcttcccttttaacgcttgaaaaatccgcgttgtttggcaaaacaacatagttttccgacacctttgcatacatgccgtgctcattcatcacgcccagatccggcgtattgtcagcagctgcgctgttttcattttcagctatgcttagtgccttgaagttactgaaatagtaattgagcagcgtgtttgtgtctgcatactggtcaggcgactgcgcattcataataaccgcgcacagcgtcaagccatccttctccgcataagtgacaagcgtgctgttagccactgaagtgtagccggtcttgccgccggtacaatcctgatttacaaactgtgaatacgacttaaatggatgcagcatcgcatgatgattgtacagcggggtatcctcggtatgcttgtttgtaggtggtatgatataggtctttgtgcctgtaatctttcgaaactcgtcattcctgtatgccgcacacgcgataagccccatatcgtatgcgcttgtccagtgattttcatcgggcagaccatttgcattgttgaaatgtgtatctgtacagcctaattctttggcttccttgttcatcagatcaataaatgtgctgtaatctcccccaagctttttgcctgtatgctctgctgcagcatatgcgcactcgtttgccgactcaagcataactccatatagtgtctgctccatggtcatctcctcgcccacatccctcttgatgctcgacgaaccatcactgctctccttcaccgcctcttttgagaatgtaaccttctcatccatcttgcagttgagtatagtcagatatgtggtgagaatctttgtgatacttgcaggataatgcttttcgtgtgaatttttctcatagagcaccgtacctgtattgacctccatcaccacggcgcacggtgaatttatctgcggtccctccggccagtacgtgtcatcaccatccgcaaatgccataagcggtctcgcacaaagcgtcgtgaccatagcaaacactgccattattagtattcctgatttttttaaatttataattttatgcttcatatctgttcctattaattctaaaattgggtagctgttcagtactataaccaaaatgtactatttctaattataatgtatgaaaaacatgttatcaagggcatgtgcatcgtatttttccattttattttgacacccacacaattgtagggtattatctatatgaaattttacgtttttataaggagatttacatgagacttagaaatatcccgggcgccggtgaagtcatcgacaacagcccttattgcataaaggagcctgttgaattaaaaggaaaatggcatgattttttaggaaacaataatccgattcatatagaggttggtatgggaaagggcagatttctgatggatctggcacggcttcatcccgagattaactatataggtatcgaacgatataccagtgtgcttcttcgtgccgtacaaaaaatgcaggaggacgagctgccaaatgtgcactttttgtgcattgatgccgcaactcttccggatatttttgaccgtaatgaggttgaccgcatttacctgaacttttccgatccatggccgaaggacaggcacgcaagaaggcgcctcacctcaagcgaatttcttgccagatatgatttgtttctcgcacctgacggacgcatagaattcaagactgacaaccaggacctcttcaccttctctctggaagagattgaaagctctgataaatggcacctcgacgccagtacacgcgacctgcatcatgatgccgcaatgaatgagggcaacatcatgaccgagtacgaggagaaattctctgctgtcggaaatcctatctgcaagctgattgcttcaagataatgcgacatatctgtcgttaatcgcatgatttatatagtcaaacatgacccagcttttatgacattcttcagatttttctgaggaactgtcatattcgtctctggcatcgttgaaatatctctgcgcttccttatctcttcccatcttgctatagcttgaaccgatattgctgtaaaccatagccttaagatctctcgagcggataatttctgccgtggcaaggctctccagataacattcaaaggcttttgactcatcgttctcaagctcatataccaatcccaggatattgagatactctgcatatttttccacgtgaccggtgctcttcaagcgcgcaagcgctttctttatgcgtacaaccgcactatcatagtccttctttaccacgtcatctactgcaattatcatttcgttatccgctatattgtctgttgaatatttgtctaccgcgttcatcatattttactccgaccaaagcatctttccaaatgttacttttttcctattcaacagtataaactcattatttcaaaatttcaatattaatttcactttttatgggactatcagactacccaaaaattatgcaataaaaaagcaccaaccctatggctcatacgtccataaaaccggtacctttgagtgcgcctccaggggctcgaaccctgcacaccctgattaagagtcaggtgctctaccaaatgagctagaagcgcgtttattaatttgtttgcgttttccttaacgcgaaatttattatatagtatagtttatagaaatgcaacactttttttaatttttttaaaattttttttagattttttgtaaaacagttgattttacaccgttttaagctatattattttctatatacagagactttttattccagatttcccattcaaagtctctcagaaaggatttactgataatgaaagtagaagaaagattattaaaatatgtgggctatcacaccacatctgatgaagcaagtgataaaataccaagcagtgacagggaatttgcactcgcaagagagcttgagtcagagcttaaggaacttggcttatccaaggttgtgctcactgaccattgttacgtgtatggtctgctgcctgccactgccggcatggagcacaaaaaagcggtcggatttattgcacatatagatactgcacctgatttttccggggaaaatgtcaagccacagctgctgcatcactatgacggaagcgatgtgctgcttagaggcagtggcgaatacctgagagtaagcgattttcctgagcttaaagccctctccggacgcactctcattaccacagatggcactaccctgcttggtgccgatgacaaggccggtgtggctgagattatgaccgccttagagcagattatcgcagagggcactcctcacggcgatatctgggttggatttacccctgatgaagaggtcggaaagggtgcggatttgtttgatctggactatttcgaggcagattttgcctacaccgtggacggtgattacgagggcgaggtggcctatgaaaactttaatgccgcaagcgctgaatttaccataaagggcgtcaacgtgcatccgggcgaagcaaaggacattatggtcaatgctgctttggttggctgcgagattgccgcagcgctgcctgcaaacgagactcctgccacaactgagggcagagagggcttttaccatctgtgtgatatgagcggtgatgtagcatcagcccatctgtcatatattgtgcgcgaccacgacaaggctctttttgctaaaagacttgatactctccgctctcttgagatagagatgaacaaaaaatatggtgagggcactgtttctttgactatcacccactcctacgagaatatgctttcaatcataatggacaacatgtacattatcgacctggctaaggctgctatagaggaaaacggtctagagccgctatcacgcccggttcgcggcggtacagacggcgcacgtttatccttcatgggacttccttgtccaaacctcggtaccggcggctacggcttccacggcccatttgagcacatatcagtggagggcatggagactgcggttaatataatcaaatcaattgtgaagcatgtgctgatgctggctgacgcgtgatttcgttgccggtcaattactgttcacaactaacagtgtgaccagccacggccacgttactgttcactactaacagtgtaaccagtaatccggcagcacttatcatttttgcagttgttggtggaatatttgtaaattatcttcgcagaaatcagaatgatatcggcggaggaatgggaaaggattacatgaaagagcattggggaatcgatgacgacaagtaatcaaaaataccgggcaacacattttgtgtcccggtattttttatacaaccatcgtaactattcagaaccactgagaacaagaaaagctgatgcgtcatcagaaaagcctaactttgctaacgtgaatttgcaggctccatgttcacagagcggccctttatctttgcattcttcatggcattaagcacttccttgccatactcagccggtacctcaacaaatgtatacttatcgtacatgtcgattgcaccgacaagcctgccaggcatgcctgactcacctgcgatggcacctaaaatgtcgcccggctttatcttgtccttctttcctacgttgataaacaggcgtaccatgccatcctctgctcctgtattgtggaaatcatagtcgtcctttgattcagctgtggatatctctgaagcacccatagcctggtataaaaatgccgccgctatatccattgccgtgtaatctgactcatttatctgattctctataatatcaatgacacttgtgagattttcctcatctataatggtggaaatctggtccataattttttctgccctgattttggcaacatcatcagatgatggaattggctgtgcatagatttttgtcttgcagtagcgctgtatgtccttgagcttatatacctccttgccctttacaaaggagaatgcctttccacagcggcctgctcttcctgtacgaccgattctatgtacataatactcgtcatcctgaggcagatcataattgaaaacagcctccacatcatccacatcaattccacgcgctgcgacatcagtggcaataagaatatctgtctttccgtttctgaagttcttcatgacacgatctctctgcacctgcttcatatcgccatgaagtccttctgcactgtagccgcgtccgcaaagctcatatgccagctcgtcgaccatcttcttggtattgcagaatacaagtgagagctttggattatagtaatccaacagtcttgtgagtacatctatcttgtccttgcgcttcacatcatagtaatactggtcgatatttgcgactgtcagctcttttttcacaatcttgatattgatagcatcatgctgatattttcttgtaatttccaaaataggctttggcattgttgccgagaagagtactgtctgatgctcctgtggcaggtattcgagcactgtctcgatgtcctccctaaagcccatgttgagcatctcgtctgcctcgtcgagcactattgtctttacatggtcaggcctgattgtctttctcctgagatgatccataagacgccccggggttccgataataatctgcacaccgcccttaagtgccttaatctggcggctgatatcctgtcctccgtataccggaagtaccttcacaccatgcatatattttgcaagcttcctgatttcatctgccacctggatggcaagctcccttgtaggagagaggatgataacctgtgtcttgtgacttgatgcatcaacgctctcaagcaccggaataccaaaggctgctgtctttcctgttccggtctgtgcctgtccgattacatccctgcccgaaagcactgccgggattccctgagcctgtattggagttgcctcctcaaagcccatatccttgatgcctcgcaaaatcttagggtttagttctaattcgtcaaatctgattgtttccatatattttttatatttcctttcaaaaaaataaagtgtgcatatttttataacatgcacactttaacatatttgtgagataattacaaaatattatttcttcattttttacgaaatatgcaataccgcatatttctttactgaatagttaccaaaatactacatactgctaaataaagctgctatctcatccggtgtcagattacgatttgtgttattcaaatctacaaccggagactttgcaggttccggttcacttacaggctccggctcaggtgcctgaggtgcctctgtgaccggttccgtaatcactttctctgccggctctgattcaggttctgtcgcacctgcgtttgcacttgcaaaaagtgctgctatttcatctgcactcagctggcggttcggatcgctgtttgtcgtatctgcaacagcttcgtctgcagcagggcctggctctactaccggttcaggttcaggtacatgtggtgtctctgtgaccggttccgtaatcacttcctctgccggctctgattcaggttctgtcgcacctgcgtttgcacttgcaaaaagtgctgctatttcatctgcactcagctgacggttcgggtcgctgtttgtcgtatctgcaacagattcttctgcagcagggcctggctctactacaggttccggttcaggtatatgtggtgtctcacttacaggttccggttcaggtacatgtggtgtctcaactacaggctccggctcatttaccggaataggctcaggtatctgttctgactcattcgcttgtacagattccggttcaggtatcgcctccatggccggtgctgattgtggtgcgtcgatcgtttgcttaggcatctcaacatttgctgtaaactgaataggatttgctgtgattgcctgactcagacggatttccatatcctttatgctgtcagacagaacctgctgcttttccataatgtccttgaggttgtcataaatcacatttttctggctctcaataatgaaatcattgctctccttgagcttattctcaagatgctcaaaagtctccataagctgttcattagagttcataatcgcatcagcattttccttattcctgttgataacaacctttgcgattcccttctgtgcattgatgatatcctcagtcggaatctttgactccttctgcagtatctcaatctttccctctatctcatcaaaatactttctaagcatgaggtaagatgccttttccgacttaaaaatactgtcatactgttcctccctcctgtcctcctttagagcactcagtgagaaaaatccgcttatcactccccacaggcaaatcataaagataactgtgattgctgcaatgagcatgtattcctttggataattaattatcgcataaaaatccgctaaaataacaagcgtggaaataagaattagaaatataacctgtatttttgcctttttttgctttttatcctgcatataattccccttcccggggcctgacgctatccgcgacagccgtaccgcgtgacggctgtggataatacaagtcccagtacatttatcttaatgtatctattatagcgtttattggctgtaatgtcgattgtttttaatgattttcagacattttcagacattttccaagtatccatgttttccgaatagcgtacgtatataccgatgttagtatattttttcattactccccgataattgtaaacctttattgcagttatggttgacaatcgacatcttttcatgttaatgtgttaaccgtacaaaaattactatgaaatttacaaaaaggagattttatcatgaaccagacagaaactatagactacaagcatggaacgacctatgccataacggtaacagcgctcatgacagctgtcacatgtattcttgcaccattatctatcccgattgggccggtaccgatttcactgacaaacctggccatatatatttcattatatctgctcggatggaaacgtggaactataagctacctcatttacctgcttatcggacttgtcggaatccctgtattttcaggcttcaccggtggcccagctaagcttgccggccctacaggcggatacatcatcggttttattgccatggcaattattgcaggacttgtaatcgatcatttccaccagccttggctccagctcattggtatgattgtcggaactatcatatgctatgtgctcggtacagcatggttctgctttgaggcaaaaagcacagtcagcggtgcgctctcaatatgtgtgttcccatttatcccgggcgacctgataaaaatgataattgccatgcttatcggaccggctattaaaaaaagacttcgctaaacatcaactccaagctttctaagctcctgatacaggcgcgctaccggaagccctaccacattattgtaatcaccatgtattcccttaatgtggatggcaaagcgtccctgtatcccgtagcttcctgctttatccatcggatccccgcttgaaatatagcggtcaatttcatcttccgtcagtgtatacatgctgacatccgtcttctcataaaagcagtgttctccggttcttccggctttgtcaataaaaacaaacgttacccctgtatagacactgttcgtttttcccgaaagcatcgaaagcatacgcctggcatcttcttcgtccttcggctttccaagaatctgattctcataagccactaccgtatccgctccgattacaagaatatcctgcggtgtcacaagctctgcatgctgttcattgtaggtaagcacacctgacgctacctcctctgccttttgacgggatagttccatgacaaccgcagatggctcctcctctgtgattatctcttctccctttgcaggacagacaacaaactctgccccaatctgctctaataattcctttcggcgcggtgatgccgacgccaatattatctgactcatatttgttttaaccttttccttcactttggattttgggactgtttcatctgaagaatacaattccctatgactgattacacgtttccacttgtattatacagctttctctttcaccgatactttcactgacataattctataaaatacagcacaaaataccaacgcaaaaacgactccaaacacattctgaatcaccctgaggctgactgctccctttaacccatagctctctgcagctatagccagagcaccaaatgtattaaaaacagcctgccagccgtattgtgccgataatcccacgccgattccacctatgattcctatgtacgcatagattgatggtggaagcaggaagtataatgccgtgaagcatataacaccggcgatattaccgacaatcctttttctgactctgtactgcatatcctccataaacggcaggatggcagacatggctgcaatacctgcccacattgcacgcggcatattgcaaagctgtgcaatacaaagaactaacggtacacatagtatctggcacagctgccatttcgttcgtgatgaaaaaagatcaaactcctcaattacagctttcatatttcttttaaagactctgtttttatgatttctgtaaaataccaggcatgtgagaacagcgcctgcggccatccctgctattcgaagcatatagctttttcctgacacatcatatccatataataataaataaccgagaaccaatgtggattgattaaacataaatggattatggcatccgaacagaatcagcactgcaagagctgcaatgtttataagcagcgccggaagcggtgaaagctgatttgccagatgtgggcatactgtcataattacaaagaacaatgccaaaagccatgtagagtgtccggtatggattcccagatcagcattgcgaaataccataacacataataagaccactactcccacaatgctgttatcctttcccaatatgatgcttgaggcagtaacaaaggcaaagcaaaaaaccattgtcacagctatcttcaccatatatacaaacgcatggtatagtttttctttcattgttttactatttttcagcaggcttttagagccggcctgatttaactgcagttcctgataaaatgtcatgtaaattctcctatctttttatcttattattttattattgtaactatcatgttctaaatagctactcattataattctttattggcagttctactacaaatctgcatcctccgtattcccggttttcagctttgattgttccaccggcgatgtctacaattcttttcacaagtgccagaccaaggccgtttccctcggctttatgggaaccatccacctgataaaacttgtcaaatattctggcttttgcatcatccgcgattcccggtccctcgtcttccagaataaactgcacagaatcattttcatgccttagaaacatggtgattgtcccattttgtggactaaacttgattgcattatccaaaagattcatccagatatgcataaaaagcccttcatttccaacatatctgacctcctccatctccacctgaaagccaattcctttttcagtccatttgtcttccaatgcaagaaatgcctgacggatttgttcatccagacgatatttggtttttttcattggaatattctgattttccagccttgataacaataaaatatttccaacaaggcctgaaagcctttgagtattaaacaggattttttctacatacccctcctgctcctgtgacagctcatctccctggagcagcatcgtatagccttcaattgcattgattggtgtcttgaattcatgggaaacattggatacaaaatccatttgcaacatctctgttgcacgaagctcttttgtcatgacattaaagctctgataggattctccaatctcggctatgcgactgtttgtttccagatgctgttcaaaatctccctgggaaactgctttcattgctttactgagcctggtaatcggctccagcagccttgcattgataaatgatgtaataagtcctgctatcaatgtattaaaaatcaaaagccagccaaggcccggtattttcccgggcaaatccaaaaaatgattcaaaaaagcaaataacagggctgatatcagcatagaaaatgcaagtgccagccagattgcaccggtcagacatgagcggatacgcaattcttttttctttttatactccattattttttcaccaccttgtatcccagaccacgcattgttacaatttcgaaatccggattttctttaaaacgctccctgattcttcctatatgtacctctatcgtatgtgggtctgcctccgtctcatatccccacacctcatccattagctgctgcttcgtaaatgtcctgcccggtgaagctgccagcttgtataaaagcagaaattcctttttgggcaggacaagcgtttcatcaccggtcacaactgtcattgcatcataatcaagctcggttgagccaatcacaattttgtgttcgttcagtatctgtgcacgacgaagcagtgcccctactcttaaaaccatttcattgacatttacgggttttaccatatagtcgtcacttcccgaaagaaagccctgacgcatatcatcaaagctgctttttgcagtaatcataagcaccggtatctgatatcccgccgaacgaagctccgacacaagttcatatccatccataaccggcatcattatatctgaaatgattaaatcaatatactctctgtccaatacctccagtgcctgtgctccatccgacgcacttttgacctgatacccgctcttttcaagcaccttttggaataacagacttaattccttatcatcttctacaattaatatcttaaacacgctttatattctcctttaatcaaaacaaatcccttgcccatccaagcagatgctgtaccagaaacacctttcttttacgtttttctgttaattcaatcggctttacatgatacggatcataatatgttccgtcgtctaatacctgtctggacacgctctcatactccatcatgccatcctccagctgtttattaatctctttactgcgtattacaagcatcagctctgtatccagataagtacttctcatatccatattgaatgaacctattactgacagatcatcgtcaatcagaatactttttccatgatacgaataaccgccttcatattcccagatatcaattcctgtttctaaaattctgtttctgtttttggcataatcagcagctccaaatggatttccgttatttgcaacagaatttgtcataatagaaaagtccggaaccttctgtgcaatttcctcccatgtattatacatcatatcattgcaaataatatatggtgtatgaatttttacgcgttcctttgcatttttcattaattctcccagctgataccataccaccggttccttagcttgggtgtggattgggtttgataacaatgtaatcttttctgtttcaaaggtttcatccgcataatctgtatcacaaattttttccttattaacttcaaaatattgctgatacccttcctgcagctctaaaactgctttctttacagactgtctgtcagctaattttttactgttatgaaaataccgacagtcctcctgttcccatattgtttcaaaataattccaaagctgattgaccgaattatctttctgtggctcatcgcagacaactaacacatcccggtcaaaatttttatgccccggaaaatcacccaaaaaataattatatgtgtttcttccgccaagaatatatattttaccatctgcaatcagatatttatcatgcattcttcccattgtcttccatggcttaagcggatttgctttattatacagcttaatctcaacattctcatgcgaagataatccataaaaatatggattaccctccatatcaatccagctctccattccatctaccaatatgcggacatgtacgcctctgtctgccgcatcatgcagtgctcctaaaatcaattttccgctttcgtctgatttaaatgcaaatgtagaaaggattatttcatcctttgcattttggattaatctaactctttctaaaagagcctgcgaatttttttcaatgattactgctctttccgtattctctctccccgccacactcataatattttgtgtttcctttatagtagcatcagacaccgccggctgttttttatatgtgatgcagattccgattaactcataaaaagccacacataaaaaaactgccagtatagcaaaaataattttacatatcttatgccttttcattgtacatcacctgattccttgtattttatactcatacaatacaatgtcaatctcaattttacctcaacagaattgattttatgcaaaaagacaggaaaaagcagctgcctgcaatttcctgtccataaaatttttaaagcacaattacggcagcgtcaagcccgtctacttttccgtcaaatgcgctatctgtcagcagattatatttctcggcatactcattaaattcctttacactgctgccgcaattgaaaagcattgcgattgtctcttcgccgttttttctgatcataacaatcgtatcatcatcgtcatttgtgattgtctcaatcatttcgccctctacgatgcatgcatgtgcttttctaatctgcatgagcttcttataccaattatacatctccttgtcctggtattcctcatcccagtacatgcctcgtctgcagtccggatcatttgctcccggcattgcatactcatcaccatagtagaccataggcattccgggcagtagcagctgaaaggctgctgcgagatgctgctttttcttattatcatggcacagatgtaaaaatcttgctgtatcgtggctgtcaatcaggttccacatcagcggatagcactttttgtttaagcgccccttcagatatcccagattctgtacaaactggctgacattaatcttttcgtctgcaagcaggtctatcagattcaggtagaatggataattcatgacagtatcccactcatctccctcgaggaagtctcctgcgtagtgccatatctcaccaattatcagcatatccttctttactgccttgattgcttttctgaaattcttccagaagaaatgactgatttcatctcctacatccagtctccatccgtcaatatcacattccttaatccagtagcaggcaacatccgtgatgtatttttcaacctcaggatttttcaaattaagctttggcattccaccgtaataaccgaagcatttgaagtttggaatttctccccattcacccctaggtggcagctcgtcgataaaataccagtcgagatattttgacttttcgcccttttcaagtatatcctgaaatgcaaaaaattctcttcctgtgtgattgtataccgcatccagcactaccttcatgccacgctcgtgggatttttgtacgagctcctttaagtcctctgttgttccaaatgatgggtcaacctgataataatcaatagtatcatacttatggcacgaatttgatttaaagattggtgtcagatacaccacatcgattcccagatctttaatataatccagatgctctatgattcccctgagattgccatgcaaatcatccataggcgtaatcggcgccttataccacagctctttgtccaccggctgtgttgtggcaaagcgcgacggaaaaatctgatacactaccttgttggctgcccactgtggcacctcaaacatctcttcctccctgaggttctgcgggcagtcaaacattctgtccctgtttgtaatgcactccttgtcgaactcataattgccgtaatataccttttcaccctgcatgtctgtaaattcaaaaaagtatctcagacatatcagattcatccgaagctgagcttcataataatcgtgaaactgtgaggttgctaccttcttcataggaagagtcattcgcgtatccttgctctccataggtatatacttgtcctcatagtgaaggattacctccttcatatcatccttttttacctgcacgcgtatcacaaacaaatccttatctatcgcatagcagaatcttttatccatgtcatgaaaaattgctgagtattccataaaatgcccctttacttacgtatttcgttattttgtattttaacgcactatctcaaacaattctatcattatatccatgacatttttacactatttctactttatgcatgattttagattaataacattttatttttttgactttattccctaaaacactgcgttcattatcaatctttgaaatctctcttttgtgccgaaaattcgagtgccttttgttcattttctgctgtcattgcatccacataatcctgaggattccagacttcatctaatatatcctccgggaactttttacgaatatcatcagagtattggctgccatctcccggctcccaatattcagatagttcatatccattctctgtcacattgaaagttagggcaacaggaccacaacctccaccgacactttcaatcccttcttcggacaaattatattcctcataaagagtgagaacatatacggtcaatgtctcattctcctcagagtttgcagccccaccggcttctgtagccaatacagtatggctttcgcaggcaaaaacacctttgtagtatctatcgctgttatgttccatgattgcattatggattgctgtatcaacattggtttcgttaatcgattctgttctggtttccccggcacagatgcgttgtaaatagctgataaagtcagagtcagttattcggtaatacacattctcatacagaattgctgcttgatttccgttggaatcaaaaccgctgaatgtgattctgtcgttttccttggtatccacatgaagggaatagaaaggtgtatgaccttgcaaagattggtctttgtgaccaatctttaagtttttaatacgactgctcaactcgtcaatttccgctgctgataattggaatgtggtcggtccgctatttgttctaaagtccatggtgcttgctttggaaatttgaacagaatcaagtttcactgggaatgaactcggatttgtcaggaaacataccccaagaacaatacttgaaaccacagcaatagcaacaatccaaaatgcaggtttcttgtaattcagcacatttttcaccctttctttgacgccaacctctccaaaggcaagtggacaaaccataactgttcttctattcacgctacaagaaagcagagcttctgaataagaaatagactcgttttgattcagtccacgaataactttttcatcgcaggcgagttcaatatctcggcaaagtaaaatatacgcaatccatacaagaggattgaaccaatggattgccaacactaaatcccccaacggtttccaccaatggtcacagcgtttcagatgagcattctcatgggcaataatatagggcagctgtgcttcatctgtcccggagggaatgtagatgctcggtttgaagaaaccaagaataaaaggtgtttgtatatcgtcacaaatccaaatgttgtcccgcacagaaagggatgcaccgactttcttttgcaagcggaaatagctgacggcagcataaacgagcatggctatgatgcctattgcccatacgattgccagcacaggaatcaaaagctgaagtggatttgcgcttgcaattggctctggagcaaaggtgtccgtaataattggattcactaccttgtcgatagagcttacgcctgtggagatttctggtgtccagtccatcatgatttcaggactgatggtctcggcacttggaatcaagctcaatgcgctttcaaaactgaatgggcaaatcaatcgaaaagctacgataccccacagtaggacattgatccacttaggtgcctttttcaaaaccacacgcaaaagtacgaccgcaaggatcagccaagatgcggcgatactcatatttacaattttcaaaaagaatgaactcatagattactcctttccggcggctgcatcaatcatgcgtcgaatctccgcagcttcctgttgagaaatacccttcctttgtgtaaaagccgcaatgaaagcaggaagggaaccttcaaaggtttcgtcaacgaactgctcgctctgaacggcatagaaatcatttttagacagaacagaggaaacgatgccaccattattctggaagataccacgctcacaaagcttgcgtaatatcgtataggtggtggagcgattccagttcagttctttttcacagagctttaccaattctctggagtgcaaaggctcattcgcccaaataatatcggcaaagtgggattccactacgcccatcttcatctcagccataaagatttctcctttcagtttattgctaataaactaattatagtttactcccgataaactgaaatgtcaataggaaacagccattactctcacaggtttcataaagttttgggaagagaatccgctgtcgccacgaagataagttttaatgctcctttccaggtattcttgaaaaatagattccataaatttatcaaaaaaatccgctatactttgtgtttaaagtatagcggattttagttattttacgatctgaaagcttctagtaataggagctgcctgataattgccaccaattgtaactactgtgactacatatctacccggctctgtaggagcctttgtgcttgaatatggcttccacttgcttgtaaagccactgtatagataatgcacattgctctggctgattgagacatcaccatcatatgatagcgttgctccaaaatcaaaggatgctacatctgaggctttaagcttcccatttgtaaagctctgattccaactaagcttagttccttttgaatgcgtcttgacaagtaaagcaccaactccaacacctgtctcataattcttgttatcggtaaccgctgtcaccgtataaagaccggcacggtttggagtaccaaatgacactctcactgtgtctgcaacagaaggaagcttatttattatctcaagaatctgtccaactgtacccgtatctatatgaagcttcttcaacgtgtcaagcagctcctgtgtgctgaaaagttttctaagctctccgactgtcataccgtcctgcatcatctgtgtaaaggactttccatatagctttgaaacaaccggatctataagcttaagtactgtgctgtttgtatacttctcaggcatctgaagataaatgcctgcatttacattgcttgtaagaccggcatagattgtatatacatcaaacctgtctgaaggatttgttgtaacaaaatcctgtggtagtgcatctccggcataaatgtttgttgactttactttaacatttacctttgccttattaacggtcacactagtctctgctgatgctgatggacgatactcggcattgcctttatatgttatacggatttgctgctctcctgcacccatctgcagataagtaagtaaattaacctttccgccttctatcggagcccactgcctggtgactccctcaactccggctacatcatcaacaccatagtattccattgtaaaatcatcaacacttaacgtatcctttgcaggcaatgtactgttgtcccaatcaattacctgatcaaatattgactgtttcataacggcagtgtccatattgtatgaaaaagatactccctccctgcatacaacggccgctgctatacggttatcggctgtagtcacatttacctgtgtctgtgtacctttatagttcttatttccatcccactttatgcggatagtccactctcccggaccaaattttttaaatgctgcagtccagtttgtagaattaagtggctgccagtttggtattatatctgttccggcattgtactccattgccacatcatcatatgtaagccctgccggatttgtctttgctatcacagcatcataaattgctcttgctgtagcatcaaaatcatatgactgatccgcgttaaaagccatgctcacttcatacggagcatcctttaaaacaaatgatgattcatacttgtaagctctgtggagtgtaacaacctcatcgcttcccttaagtctgaatttgaaatctccttcaccgttttctaaaaatgccggatgattatattctgttgttacagtattccaaagtattttttcgttgttgtgctcgtaaagccctctaagcttccgaatgctgtatttttctgtaatttagtcttatccttgccctcgcactcgtactcccaatcaaggttttttacatcaacttcgtctgcgtttacaacaagcgcttttgctattgccgctttagcagtctcaatatctgcaccctgcggaataactgctgttccattctgaagctgtactgtcaccttctgtgactcatctgtcaataatgcactgccgctgtcaacagactcataagccacatctgctgcaaatatgacctgcgttgcaagtggttctatcgcttttatttacttatattactgcacactcagatagcttgtcacacaataaagtgtctgtccattatattccacgcgtgaccagccaaactcctcattgattccggttctggtgacggtttccccattttttatcgttgcgatgactgtagcatccggatttgtgacacttggaagtgcacgcagattaacctctatttttgcagtgacagtatcattacactccttgaactttgtcttcagtccgtctccgctgccacttccgtcctgcccgggaactacatagttcatatctgttgtgaggtagtttgaaatggcataatatgtctgtccattatattcgacacgtgaccatccactgtcactgacgcctgttcttgttgctgtatcaccgttattcagcgttaccttaattgtgctgtcattgccctgacttggaatatccctcagattgacgctctccttggcagttacggtctcatttacatccgaaaacttcatatttgcttccggatcagctgctgcattgtcagccgcatctccattttttgcagactctgtttcatcaaacccaaagtatgcaacattcaaatctaccggcttatcaatccctgacacctttcccttattggtatactgccacatagcatgtgtgccctcataagatgactgtggtgtttccggataagccgtgtccggatattgtgacacccagattttgtacctgctctcaagtgttttagtatcccactggctgtttgccgacaactcattcattgcagcgtaaaacataggtgtatatcctttattatatatttcctgcaaaaatgcctcagctactttggtgcgtgcctctgatgacatgccatactgtctgctggctgagtcagtgaagccctcgcagtcaaatgccacaggatatgtaatctgatattttgagatgtagtctgctacccagtctgcctcctcaatggcttctgtttcatttactgctgatgaaaagaaatataccccgacctttatgccatttttctgcgcctcctgcatgttgtatcttgcatttgtatcaacacacatctcgcctgttttctgggttctgtagcccacacgtatcattgcaaaatcaattccgcctgcggcaaccttgtcccactttatggtgccctgatatttagatacatcaattccgaaggtcagattactattttccgcaacagtgcttgcagacagtatctgtgtctcatccgcagaagctccctcatcagttgtaacactcattgagccggcattgtcgcccgtatgctgcgggtcttccttgtctgaactatcctctgtggctgtttccgtcatctgtgacgagcctttagcctcgttttttgctgacttaatcacaaaaaatgtggcaactgcagccagtgcagctactatcgcaacaattataaatattgctattatccttcttttatcgttcatagattttcctcttcattatttatatatgtcaccatgtacaggcaatctgcttttatgcaacaaaatatatcatataatcatgtaattttcaaatatttgtcttttttcagaaaatattaaaaatccgctatactcacctatcgtatagcggattaatataacactatttaattttcagtcttttcaccgtttttgtccgtatccgcatttacaacgagattcactccatcaagtccggttacatttacgttgcgatttacctttgcgtcatatgaatcagcgttgataatctcagataaatcaatacctgttgcctctttcatactctcaaatacctttgccattacaaccggtacatttccggcaaccttgcctacaccattttcgccatcaccgccaccgataatagtaatcttgtcgatttgtccaagtggctctgcaaccttggctgcgatatcaggcagcaccttaatcatcatctctgcaacggctgccttattgtacttggcatatgcctctgcctttttctccatagcctcagcctctgcaataccctttgcctggatagctgatgcttctgcctctccgactgcacggataccggcagcttcctgctccttggcatatctcatggcttctgcctctgctttctgtgcctccgcctgacgctgtgcctcgaactgtcttgcctcagcttccttctgacgctggtagagctgtgcctctgcttgctgctgtgccgcgtatttattggcttcagcctttttcttgacctctgcctcaagagactgctctgttactgcaacctctttctgctttaactcaatctctcgctcctgctttgcaatatcagcgtttgctgtggcaacctcaatggtcttacgctgctcctccttctgaatgtcgtaagccgcatccgccatagccttctttgtatcagcctccatctgaagctctgatttcttgatagcgagctcattctgtttcttggcaatctctgtctgtgctgcaaccgctgcatcatttgactctttgtcagccgaagcctgagctaccttgatgtctctctcactctctgcccttgcgatggcggcggcctttttaatctttacgatattgtcgataccaagattctctattacctcgttgccatccacaaaattctgcacattaaagctgatgatatcaagtcccattgccgcaagatcaggctctgcattctcttttaccagattggcaaacttctgacggtctgagaccatctcttcaagcttcatttttccaacaatctcacgtacattaccctcgagaacctctctggcaacaccagcgatatactctgtgtttttgttaaggaaattctcagccgcaaggcgtagcttttcaggattattactgatctttacgtttaccgtagcatcgacgttgatattgatataatctgctgtcggtactgcattgctcgtctttacatcgataggtatcagtctgagattcagcttatcaagacgctcaaaaaacggaatacgtatgctcgcctttccgataactacctttgactttttcttcacacctgaaatgatatacgccatatcaggcggtgccttcacgtatccgattgccataaacaacaggataacaagaacaacaactgcaacaataattccaatgatactaatgtcctgcataactttctcctctctttagtatgctttttattaataatttaacaatatcattttattataaatatattgttttgtcactctaaatattaaaaaaataatataccactgtgcatttgttctgattatggtataagcgatgcaaacataaaatttagaaattacagatatcttcttaatcagcaggcattacttattcatcaattttattttgtaatcatcatcccttgtatttctcctgtatttttatcaaaacttatatttttcgctttcccataatcttccatttccagcttctatagaaaacgcatatattattgcgctcccattaaatggtcctgtaaatatacaaaaatttctttcatctattacgtatgtataccaatttccattttgttcaaaatatccacactgatttggcttttcgataaattctccaaaatggaaatctctatacttttccttcatgttctgcagcctcaataatttcattatcaaattgcatttgatattaccaaatatcaattctagatacttcaaactgcatacacatccgctttgacatatcttttggaatcttgtcttcatcaattatcacctattcaatttctattggctttctacattctcctactatacaatcaagcatttcatcaactgaaccacccaaaaataataatagcccatctgtaaaacaataaaacgattctgttaatgtcattagtactaataaattctttctacaagcttctccaattggatatactgtttcatttatatcatattcagctaaacactctttaaaatatgaaccatcaagattacatccaattgctttgattgcattaaacgaaacatcaaaatagcacttatctctaggatttatatttaacatgccatattcttttaagaatttatctacaacttctggatattctaatccaatttcatcatatttctttcggatcaaatcagtattaatttttcgttgttctttccaacctgaatcaatctattttttgtaatattattcatacacattaattttcctatttatttaatttaatattgtcaacaggaattaatatccctttacaaccacgatacttcccagtggtaaaaattcagttttctcattaatcactcttcacctcacattttattcccgatttaatatcgttttctttgttatttctttctacattacattatacactatggtggtcacacagcagtcacaccggaaaaatttctctacttttttcattttttgcgaaaaaaatccctcagagctgttcgtgccctgaggattgttttttcttttgcttcaaagctttcgcaatattctgttgctaggagtgcgttacatcagcatattcattttgcaatatttgttcgtatacccagctcggcaaaatttcgctagtgtctattaattaacatcttggattcttaattgcttcgcaacagctatgatggttaattaatagacatgcagaggctataggttgttgggagttccagagtataaccctaataatatattttttaattcatcaattggtcatacaaaaattgacacgcatcattttcagagtcaaaaatttcatttgttgtcttaatacctctttctaaataataaaccgaccacttatcctgaattttttccaagcataaacattcatcattttttccttgtcctgtcagattataaatataatctggaattccagctatttttaattttttttctaatacctctctagtcatttatttaatctcctttatatagtctaattcttttaattttttaatattattgggtaattcatactgtattccacccccaacttgttcaaatgcaggtgcaatctcagatattgtaacgttatcaattggttttaatacttcatatttatgatatgcatttgggttctcaatatatggaagtgccctttgttcatatggtactcctgctggtgatgtatattttccccattgacttccatatctgtcaataatagttcctgcaggaatagtttgattttccttgattgttcctggtactcgcccaccatttggtgcccacttttcccaatcaatattttcatctgcgtctaaaaatttagtatctcttacaactaattcatcagtacctataaaatatgttccggataaggacagaaaagcgttcgcttccgacctaaaaacgatttaccatgcttccgatgaagagaaagctagactggctctggatcgtgttactgaaaaatggaccgcaaaatacccgaattccatgaaacgctggtatgataactgggacgcaataacaccgatttttaagttctcaccggatatgagaaaggtcatttacacgaccaatgcaattgaaagtctgaattctacctaccgtaagctcaaccgtcagagaagcgtatttccaagtgatacagcgctcctgagtaaacgtcaaaccacgcgccttggataattagcatttttgtgagacactctataagacacgaaaaaactaatagttttttagaggaggcaaactatcatggataaatgtactcacgatgtaaggcgtgctaactggttaaatatcataaatcaatgtcaggaacgacctgcaaacgtaactgtccatcaatggctgaaagacaatgatatcaaggaaaaatcttattattactggctgcgcaagtttcgtaaagaatcatacgaccagatgcagctgcctgtaacaaccgaaaatcctgccgaaatttcttttgttgaaatagctgcccctgttacatcagagaaaactattcaaacacgggaattttcgtcagcttctaacgcgactgcagttgtcaggaatggtgatatcattctcgaaatatcaaacgatgtttcagatgctgtgctaagcaggctcttaaaggaggtagtccatgctggagaacgttgctaaaatcaatcgggttgtgcttgcgtgtggtacagtggatctgcgcaaaggcattgatggtctctcgatgatcattggtgacaaatataagcagaatccttttgagaaaggaaccttgttcctgttctgcggtagacgttccgacaggattaaaggactgctttggatgggcgatggatttcttttgctgtataaacggattgaatccggttcactatcctggccaagaaccacggaagacgctgcggatcttaccgaagagcaattcgattacctgatgctcggtttaaatccgctcgatcctaaaatcaaggatgtaacaccacaaaatcccttctgagtttgtgcaaaacagagatttttcaaagacatttatgacgtcaaaaaatctatagttgaacctggtttatatgcctttttcacaactggtacaatggttagctgttacttgaaacaaatatcttgaaatttgaaagctctatatttccctgcgtttatcagcatcctatagccttatagcgataggcataatgacggagagctaacacacaagaattcgctaattaaagctgcttctgttataatgaaaacagtttaagggagtgaagcaatggcacagaaacatacattggaagaactgaataattgcagccgcgaagaactgattaccattgttcttatgatgcagggacagctcgatgctttaaatgataacatcgaaaaactcattgagcaggtccgcattgccaataattatagatttggcaggcatacagagagcttaaaatcaatcgaaggccagctttcgttttttgacgaagcggacgccgcctatgatgaatcttccagggagccttctgctgaagaggtcattactgccaagcgtacaaagaaaaaagggcagcggaatatcgacctgaaagatttcccggaagaaatacttccgccatacagtgtttctgaagaacagctggatgctttttatggaaaaggcaattggcgccgtatgccggatgaaacctacaagaggcttcgtcatgagcccgaagcatggactgtcgaaattcatactgtcgaggtgtatgtgggaactgatggtgatcatcaggatgagttccttcgtggaaacagacccaaggacttgcttcgcaacagtatagtgacgccatcattactggcatcaatacttaatgtaaaatatgtgaattcatcagcattacaccggattgagcaggagtttcaacgtaatggcgtaaatatatcacgccagacaatgtccaactggattgtcagatgctcccagatgtacttcactccgtttgttgaacggatgaagcaggagctgctgtcactgcatgtcacacagtcagatgaaacaccgactcaagtaatagcagacagcgaccacccaaacagcaagtgctatatgtgggtgcaccgttccggagagttttatacccgacgcccgattgtgatatatgagtaccaaaaaggacgtgatcatcaaaagcctctggatttttacaaggattacaaaggaatccttgtaacggacagcctgcagcaatatcatctagttgataaaaagcttccagatgtgacaaacgcaaactgctgggcgcatgcaaggcgtgattttgcggatgcggttaaggctgccgataaaaaggatccgtcttctgtaaggcagtctgttgcctatcaggcattgcagaagatagccgggttttataatgctgacactgagttaaaagggctctcatcagaggaacggcttcaaaaacggcaggaattgatccggccgctggttgaggaattttttgcgtgggtaaaacaacaggttaacgactgtgcggtacctccaaaatccaaaacaggccaggggctgaatttcataatcaatcaggaaaaatatcttaaggtatttcttgaagatggagatgtccctatcgataattctgcctcggagagagccatacgcaccttttgcctcggcaagaaaaactggatgttccacaatacagccaaaggagcatctgccagtgcgatggtatacagtatttcagaaacagccaagctgaataatctgcggccgtattattattttaaatatatcctcacagaactgccaaaactctgtgaagaaaaagaaaatatagatccagaaaagctggactatctcatgccatggtcagatagtcttccggacgaatgcaggaagccacgtcgccaataatgggcggcgttgattttaatgactggcgcatggtttgacgtttacgctcctgaaagccctgtatcttgcaactttcgaagctactaaaaaatggactatgagcattcgaaactggggacaggtctacggtgaactcagtattatgtacgagggaagactcccagaataacagaatctgtatgcatgatgagaaggacgtttttgacgtctgctcttgacatgcccgaaatcatgtcgtatatataaaacaagagctggaagctccaatttagcgcttccagctcaatcattatcatagaagattattatttacagacttttcttcatagtctctgaaataacttgagtctcaataacttttctttcaaccaaagaactttttacgtcataggtattcttttgtctattctgctttatttttctgttgaattttattggattctatgaatggatagtttctcgtttctacagtatcgtgtgttgtcagaaaggagaggtactcctcctttacggatggagcatctcccctagaaaaaccgcatcagaaataagtttcctaatccctaatattattgtgtaatagattttttttgaacataaaagttctcaaaatcaattacaaaattccaatcattccttccaaaagaatctctagtcatatcacttgttccttgagcaactaccataatattaccatcactgttttttaaggatacaaatgtatagccttgtggcgatactatttctgctataaaatcaccttgttcatcatatattaataacgaccttgtttcttctaattcttttaagattattaccattcttttttcttcttcataatcagcagaaattattgcacccttaatatccgcaatattcacttctctaaatgtaagactatctcccaaatacttatatgaaaccactaaatttccacatttgtcataaatactaaatccgctttctgatgattcatatttttctttaaccattaggaggtttttcccatgtttaaaagcatataatacatgagcgttatgaatggtaattgtcctacttcctacattccattctatttttttttcattcttattaacacgcacatccatttaattatcctctttcttttaatctacccaatattcatcaataatatggacataatcttctctttttatctcacttcctaagtttgaaaacaaatcatattgtgtcatagttgtatcacctggtaaatacaaatctgctcctaaatcaatttgcggtccaactggacctgcattcacattcaactcaataccactattaacttcaaactcacgtataacattacaagaagttttccaatcatattttactgccaaattatttctcacaaaatccgtactatctattctttctttaactccaaatcctccaattacattttcaggcgcattattttctactgccataaaaaatctatcgcctgcttttaatgttgttggagttccagtttcacccaatggccacggactctgtttttgtacaatctcaaaataatcatcaatagttccattcggattggcgtccttaaacgctttccatgtattgtctgaacctataccaagttcacgccagtactcactataccgagccgcttcctcagccgacattaaatctcctgaatatgtaccactctcaacaactttcccagcatcttccgctgcactctcggctcccttggctgctccctctagcccttttccggctttccccacatcttccgctaaatttccagctttctcggttactccatcaatcccttttggagctttcgccagcttgttcgcctctgcttcaattccattcagcccctttgcagttactccacttgcaaccataccggcaaccattcctgctgtatcatttcctgtcacatctgtggttatcttctgcgcaccggctccgactcccattgagatgccttctttggcgactattgttgctgtgcttttgaatgtcagatttcccgctgtagatgcctgcccgattggaatcattgcagatgccgcaaatgcaaaggcattttctgtcagataatatgcgtcctcgtttccctgaaacaggtcatcctttatgccgtttactgccgtgctgtcaatgtcacctgtgcttccataataaatatcctgagtgccctctatggcatctgcagctccgaatactgctgttccgcttcctactgctactgcaacgtcagctactactggtgttgcggcacctcctgtcagcactatgcatgctgcacccgtcgcaattagtactgctcctccaaccgtcctccagattccctgtgtctttctcttttcggcttcatcctttatcttctgttctgtctcatagatttcatcgtatgcttctttattcttctcatgcaggtctccaaatattttaatgcccgtgttcaaggtacctgcatctttacctgtgataaaactgcctgtttcatagctctcaatcgcacactggctaaggcctatttttgaaagacatgactgcagattttccagaagcagctctaccgaattttcaagccgtaccacattttccctctcgtagctgtttacatttgagacaagctttataaggtcgctgtccatctgctcatggatatcaaatactccgttactgtccggcatgcccacatcagatatgtccgatacttctgaaagagcacttcttattttgcccgtatactcatcagtatcctcatagtttgatgccagttttttcctgaattcctgtattgcttcttcatccagtttgaagttcgtcgagctatcaatggcacggtatccatccttgtatgctgccatattgtcaagcagtgtctgtgcagttactttaatgcctgacaggattgttatatgtgcttcaccaagataactctttactgcgtctccggtttttcctgtaaatactgcattttccgtaaacgtattgattctttctatgcagttatcaatattttcaattagattttcaatttttcgcttatattcccagaacagatcgctgagatccgtataatttatctgaaacccttccattttcatctcctagttttatggtatcacagctgtatctgatagtccaataccatttttaatataatctccctgttttctgtcattttcatttattgcatttattatcaagtctatttttgccagatcagttcaccatgcttcttttgagttttcttacatctgcgcgctctatttctgttttctccatggcattaaagatgttgtcacacatcattatctcatcatcatctacatacccttcaaacacaaccctgctgatatctgtatgctgaaaatacataagcctgtcaccattcatatcttttcacgtataatccaattatcttagatggtaattggatttttcctttctcccagttaacactgggtatttatttccatctctgatatattttgaaaaggcactgtggatctgtatctataacttttacagctttgactggtatgaggtgactcagaccacagcttttcgtctattactgttaatcagtttgttaacgcatcgacgtttttatttacgtgattacacagccgaattctctgtggaagacagcagtgctcaaaatatttatcaggaggtataaacctatgtcaatgtactttattggaattgatatttccaagtacaaacatgattgctgcatcatttctgcagctaatcaaaaagtagtttctaaagtcataatcaaaaacaataaagccggctttaatgaactgcttacaatcattcattctcttgcaaatcctgcggacataagaatagggtttgaatcaactgcccattatgctctcaatcttgaactcttccttgaaaattctctcctaaccttcatggaagtaaatcctgttctcatcagtgaatacaagaaatccaaaacacttaggcgtacaaaaaccgactctgttgactgtgaatcaatagctcgttggttaatgactgttgaatacaaaccccattcaaaaggattttaccatgcttactctttaaagtcattaactcgtttacgcgataaacttatccgacagcgttctttctatcttgttaaaataacaaatgtgttagatcatacattaggtcagtttacaaggaactacacgcagaccgtgaaacgggctgctgacaacaaacggcgctatgctcccggctgggtgcatagcacctgtttgttgcgggggtttccaaagggggcagcgccccatttggcacacgactttgcggagcaaagtgtagtgtgttatacgctctgtcggcgttgccctgaaaataccgttgccgccggggagggcaagggcatttgacgcggcaggaaagcagggctttgtttggggctggtaagccggaaacaaagggctgatttcagcagcagacagggcgtattatgaaagcccccgtccctcgtcctccgcccccggcctatgggacaaaaagtcccaaagctctggacaccgtgaccagatgtgtggccacactccgggaaaagtagcaggacggcaggaaaccgtcaaggctgaaatgaatgggctgacgcccggccttgaccgttccccgccgccccgctggatgggtggacaaggtggccaatccctaaaagtgtttggccgcactcgttcattttggggcctttcttctcccaaaattgaaatgggcgggaaagccctaaaatggctttcccgccttgattacccattagcaaagacgggcgagactgtcaacggcggcgctgaaagcgccgttcatcttgaccgttgactggctcgcctggctttgctactgcccgtaagagatggaaaaacaagatggaaaacaaggttaaaaatggttgacaagtctatcggatgtgtgttatactgtgcgacagtttgagattggaaggaggcttacgtgtgttaatttgtgtacgctaataagcaataaaaagtagaagtacctttccacatgatggtgggctttttttgcgtgcgtatgcaaaggaacacgtaggtttgacacgagcagtctttgaactgtatcgtggtgttttttcgtgctttgttgttatgcaggcgtctgccctctctgtgggacaacgcctgctttttattgcagaaacaaaggaacaatgcaataaaaaaggaggttcgcattatgacccaaaacaacaattcatggagaaaaacttattttacacttcttgccggacaagcaatatcctttattagcagcggtattttgcaaatggccattatcttttatttggttgcgaaaactaattctgcaatcatattgacggcggcaacactgattggatttttgccgcaagcctgtttaggcccgtttgcaggtgcttttgttgaccggcacagccgtaaaagcgtaatgattggtgcggatttgataattgccgccgctggcggtattctggcgctggtggcgttttacatggaattgcccgtatggtctattatggttgtcctgttaatccgaagtgcgggaactgcttttcattctccagcattcagcgcagcaacacctatgattgtgccaaaagaggaacttacaaaatgcgctggttacacgcagaccatgcaagcagtaagtgcgattatcagtccagctgccgcagcgtttttatatgctgtttggcctcttaatgcaattatattgttagatattgtgggtgcaatccttgcctgtgtgactgttgcgatttcgtccataccaacgcctgaactatgtccagaaacgaaaagacaacagtttttacaggatatgaaagaggggtatgtggtattaaagcaaaacaggggcctctttgctctgctctggattggtgtaatttatatgttcttttatatgccaatcagtacgctttttcctctcatctgtatgtcatacttcaaaggaacaccggcccatgcctctgccgctgaaattgcttttgcggttggtatgctgcttggcggagtcattctgagcatttggggcggttttaagaaacggcggtacaccatcggtctttccgttctcctgatgggcgttagcaatatgctctccgggcttttgccgccagacgcatttcttgtctttgttgtgtgctgtactgttatgggaatttccgctccattttacggtgtgcaaaatgcgatttttcaagaaacggtcaaaccagaatatctgaggagagttttttctctactgacaagcgccgcttccctcgccatgccgtttggccttgtcatttccgggcctctggcggagcggctgggagttgagaaatggtttgtcatttgcggaattggcattatcatcgttgcgcttgccgtatttttactacccggtttgagagagattgacaatacgcaataatcaactgcacctttttctattactaaacaaaatgcctggatggtggttctgaaaaaccagaaccgccgttcaggcattttttatcttcgtcctctctgcggttttggattcttcagcaagtcggatttttccgcaatctttttcagccacttccgttcttctactgacagcttcctaaaattcagcttgagccgtttgcagataaacgccaagtacgcttgttccgtgtcgctgtcctggctgacgatttcaccagcagtttccagcatttcttttagcgggttatcctctgggacgctgaaaaaatcgtccttgtgtgtttcccgcagagcaagggcaatcccgtttatgtcccgttgtatcacatagcggcaaaactcgtcctcatcaatatgggcggtgataagctgtcttaactgcgtatcactcatgccaggattatgcttttttataacagttgcgctcatcgtgtccactatggcgtttgcaccctgcgcctgtttcagtgccgttccgttcacatagatttcaaggtcagccatcagccgggggaaatccgggtgcgccgccagctcacacagcagggtattgtctatcctcccgcttttcagcaggtcaatcatttcatcactcaaacgcaggtctgcaagatcggcgtttgggtgatttttcatttcagacagccccagcagataatcagcggtcacaccgtaaaacttcgccagccggataagggcatagtggctgatgtccttgaagtcttccgtttcgtaactgcccagcgcagacttggaaagcccggtctgctccgcaagctgccccagcgtcaagccacgctccacacgtaggtcttttaatcgctcttgtatggataaagacatattcaccctccttgctagctcaacgaaagagaagccgttatgctatgtactatgctcatagcataacggcataggcatttacagttttattttaccatttgctacatcttcacgaaatttatcaacaagcttcgctgtcagcttggatttaccgtagtgttcaagtacaaaagtacgataactttttccatctacaagcacatcactttttctggtcaacaaccaatttccgttacctcctccctgttctctaatattccagtctttcccatatcttttatagatttcatcttttttaccttgaacagacattgattcgcttggaatataaacaatttgcataatagctcctcctttattttgtgcaagaagaccagaaacctgaatttgtcttttatctttttttgattatatcacaaatccgagagcgtggaaatagggagtttttcaggctgatttcctacctcttggatatacggcacaggcggtcaaaaaggtgtagacttgggatagttcatcgatggacaagcaccttggaaacagaacacgccaaagaaaacggagggacgcatgagcaaaagaccctatcaacacctgccgccgctggaacacaggccggacggctccccctaccgcataaccccgccccagaagagacgagccagcggcctgatacgccgggagtgctgcaactgcgaggacggaaactgccttgcgctggacgatggcgacacctgcgcctgtccgcagatgatttcgttctccgtctgctgcaagtggttccgctgggcggtcttgccgctggacaggacgctggaagcggagatttaccgggacagggacttgaaacgctgtgcggagtgcggcggtgtgttcgtcccgaagtccaaccggggcaaatactgcccggactgcgccgccagagttcacaggcggcagaaaacagaaagtgaacggaaaaggaggtctgctgtggacagttaagagcgggaaaagccttgatttgcaaggctccgcaagccctcaaccggggcggctggtatcatttatcattcgccccggaaaacgggcctctaaccgtccacaaaacacgctatgacaaacacgatttatattcaccagccggaaaaggcgttcagtttcacccggctccccaatttcctttttgaagcacccacattccagcccttgagcaacgaagcgaaggtgctgtatgcctttgtcctgcgccgggcggagttgtcccggaagaacggctgggcggacgagtacgggcgggtctacctgtactaccccatctgcgaggtggtcgctttgctccgctgcgggcggcagaaagcggtcaacaccctgcgggagttgcagtatgcggggctggtggaaatccagaaacagggctgtggaaaacccaaccgcatttacccgaaatcctatgaagcggttccaaacaccgacttcaagaaatccggttatggtacgccggagggctgaaaaccgtacttggcgagtacgaaaatcaatcctcttgaagtacggaaatctgacggtatatagaaatacagagattaaaaccatctatttacattcattccattccaatcctatcagagatattttcggcgggaaaacccgccggaaaggaatggaatggggaaaggagttcaatggcacaacacgcaattttgcgatttgagaagcacaagggccacccggcggggccgctggaagcccaccatgaacggaaaaaggagcagtacgccagcaacccggacattgacaccagccggagcaagtacaatttccacatcgtcaagccggatggccgctactaccatttcattcagagccgcatcgagcaggccagatgccgcacccgcaaggacagcactcggtttgtggacacgctgattaccgccagcccggagtttttcaagggcaagtccccaaaggagatagcggcctacttccagagggcggcggacttcctcattgaccgggtgggccgggagaacatcgtttcggctatggtacacatggatgaaaaaacgccccatctgcacttggtctttgtgccgctgacaaaggacaaccgcctgtgcgccaaagaaattatcggcaaccgggccaatctgacgaagtggcaggacgattttcacgcctgtatggtggagcagtaccccgacctggagcgtggggacagcgccagcaagacgggccggaagcatatccccacccggctgttcaaacaggcggtcaacctctccaaacaggcgagggccattgaagcggttctctccggcattaccccgctgaacgccggaaagaagaaagaggaagccctctccatgctgaaaaagtggtttccgcagatggagaacttctccgggcaactgaaaaaatacaaggtcacaatcaatgacttgttagcggaaaatgaaaagctggaagtcagggcaaaggccagcgaaaaaggcaagatgaatgacacgatggaacgggcgaagttaaaaagcgaactggacgatatgcggcggctggttgaccgtatcccgccggagattttagcggaactgaaacggcaacagcggcagcatggaaaggaaaggtgatcttataagtaatatcagatacaaaaaggaaatcgaaatcgtgacttttcagggaaaggaaatcacactggaaaatctctccccggtgttcacgccggaacaggaagcagccaaacgccgggaactggaacagcagctttatgaggtgttccgcaagtacgccgacaagcgggagagtgaggaagccgggacataaggttttccaaacccatcattgatttgcggggctgctggcggtataatagaactgtcagcagctccgtttcttttttaagaaaaggagcgacaatatgaacaatcggatagacgcaatctatgcaagacaatcggtagacaaaaaggacagcatttccattgaaagccagattgaattttgcaaatacgagttgaaaggcggtaactgcaaggaatacacagacaaagggtacagcggcaagaacacagaccgtccgaagtttcaagaactggtgcgggacatcaagcggggcttgattgcaaaggtcgtggtttacaagctcgaccgtatcagccgttccattctggactttgccaacatgatggagctgttccagcagtacaatgtggagtttgtgtcctctacggaaaagtttgatacctccacgccgatgggacgggccatgctgaatatctgtatcgtgttcgcccagcttgaacgggaaacgatacagaagcgggtaacggacgcttactactcccgcagtcagcggggctttaagatgggcgggaaagccccttacggcttccatacggagcctatcaagatggacggtatcaacacaaagaagctggtggtaaacccggaggaagcggccaatatccggctgatgtttgagatgtacgcccagcccacaacttcctacggggacattacccggtactttgccgaacaggggattttgttccatggcaaagagctgatacgccccacgctggcgcagatgttacgcaatcctgtctatgtgcaggcagaccttgatgtgtacgaatttttcaaaagtcaaggtacagtcattgtcaatgacgttgccgattttacgggcatgaacggctgctatctgtatcaagggcgagatgtaaaggccagcaagaaaaacgacttaaaagaccaaatgctggtactggctccccatgagggtatcgtcccctccgacacctggctgacctgccgcaagaagctgatgaacaacatgaaaatccagtctgcccggaaagccacccacacatggctggcaggaaaaatcaagtgcgggaattgcgggtatgctcttatgagtatctacaatccctccggcaaacagtatctccgctgcacgaaacggctggacaataaaagctgtcctggctgtgggaaaatcatcacttcggaactggaagcggttgtttatcagcagatggtaaagaagctggcaagctacaagacgctgacaggaaaaaagaaagcggcaaaggcaaacccgaaaatcaccgccctgcaagtggaacttgcccatgtagacagcgagattgaaaagctggtggacagtctgacgggggcaaacaatgtcctgttctcctatgtgaatgtgaagatagcggaactggacgggcgcaagcaggaacttctggcaaggatagcggagttgactgtggaggccatcagcccggaacaggtcagccagatttccggctacctcgatacctgggagaatgtatcttttgatgacaagcggcgtgtggtggatttgatgatcaccaccatagccgccacaagcgacagcttgaacatcacatggaaaatctgactggcggcacccctcccgtcagatacctaccctgtgtagtcccttgtaaactgtactttccctgagtttaaaccattctttaatgaacgcttatccaaaaccgctctctatctgcttgagaactatggttctgctgaaaagatggctcgtatgaactcagcctcttatgaaaagctacgttccgtatcccgagggaagttttcaccacagcaattcctacgactaaaagaacttgctgtcaatactgttggtgtaaataactctatttttgatgtagagctgaacagtcttttatctttatacaaatcccttgtaaaagagattgataccattaaaaaagaaatcaaccaactaattgaagaagtacatcctcactatatgtcagttcctgggatcggaccattatcagcagctgtaatctattctgaatacggcgatatatctaacttcactaatccaggacaaatgcttgcatttgctggaatagaaccgggaatcaacgaatctggtactgaatctcacggaggcaagatggttaaacgtggatcatcccagctccgctacacacttatcaattgttgtctaccattaatccgctttgacatgacatttgcaacttactatgccaagaaacgcggagaaggcaaaccgcatcgagtagccattactcatgtagctaaaaagcttattagagtcatctacgcattggagagccaagatatcgactttaatgctcaggaacttcgttaatctctagtggattaatactaatttctcccatctgaaatacgatgtattcagatggcttattaaagttacccctttttacaattcaaaaaaatttcaaaattctcttgactgtttatagtttgtcacctcatacttcaataaacttttcatacatacaaaaaggctgcagcaactggtattaaccggttgttgcagccgaactgtcattactacatgtaactgttttagactctggctttgcgaccttacgtttccataagtgtgcccttatggttaataattttattgaatttgcacatttttgtcaatatattttctttattcatacagatgtaatatagcaataaaattgttagtagcctgtctgtgaacgtcataattcatcttgaagtgaaacttaattgcaaacaaatcttgaaaaacacttgtcttcctatgttttcaagatacattctggtagttctgtgctataaaaatgagtaaaacgatatccttctcataccaccacaatatgaagaaatttaatataaaacctcgtactgaaataataaatgcaaggtcggatgcttcttacataaaatcagatactataaggttttctatcacctataaaaacatcagttctgtggagcagctataattctccattagcagaaatgccgatactgtatggctctccaccataatctgaaaactttgtccgacacttttgtctgagtacaacgatttcattatactgaaatgcatctcttaaaattaccagtatactgaagaaaatctgtaaatagatttccgctttttagaccaatttttgtatctgaaataccgcttataagactgattttgataaaaaagcacttaccgtttataacaatacttccaccagcatcgggtataaaagttactacttcactcatactttttcatcctctccaacaaacttgctctatacggcatttgctccgcaatttccaatggtgtttttccccatgcattcttgtgattaaccaaaatactgttctgtgcaaaccaaatttgatataatggttcaagttcctcatctgtatattttaagttaatcaaatactgtaagggtactctttccttctcatctaattgattaatgtttactcccttatcaattaattttttgcacaactctgctgtctgttttatattgtgctttgttcttgacagtagaatatgcaacagattttcgccacactcatttatcacattaacttcagcacctttattgagtaaaaaatctgttattaaataacgactttctgtatcattattggataatgaataaaataataatgatttacctttatatacttttttctcgtcaccttcattatagcaggaaataaactcatcatactttttcatttttgctactaaacttatatccattgctttctcctttattcatacttatgactacgattattacttggcaattctggtctatagttggcagggtcattataccaatccacaaattcttttgttgtcaattcaccattcatatatgcttcatgcatttctgaatattttgcttctggaaggtgtcccatatcccataccccttttctagattctcctggtgtccaattaataacctcacctgtatttggatctctaaccaatccatcaggacctttagcattctcccatacttcttcaacaacaccttttctaaatgaaggtctactgttagtatatggttttgtatcagccttactaccactctggtatcggaaacggttcgctactctttcctcacagcttatggtattaccaaacgcatcatactcataatgattgagtactctgtccgagactttgtcctgtgcggctgctccgttctccttatcctcgcctctgatgatacggctcacgctgccctgctcatcgcatacataatggtaatacgtcttggcattctcgctgtcggagctgatcagtcccagtccacggatatagcggatgatgttgccgctgtagtccttctctgctacgacttccctgttttcattatagaggaactgcactaacctgccattctactattttaatggaacatgaacatttctaataaccttgagttcatttccccctacatttgacgtccccgaaaattcaaaataaacataggctgtattgggaatcaattccatatctgccaaagtaatctgattcaatttctctgaatgtcttgttccatcgaaatttctccattcagtcagattatttgcaccatttgtatttgttttcggatttagcaataaatcatctgatattcttcccatggattaatatgctcgtaaagaattatccgcattctgaataagaatttgaaattgtcacaagaaaacacattgtcttcacaacactaaatgctatgaaaacaatatgttctaagtctttgaagaagtaatattccgtttttatttcggatgtccttaagtgcacccagatgcaaatttcgccctaagttctttaaactaatctccatggattttatcagcttcggtaagagccattccgattaatttaaaggcccaaaatttttgtggtggttgtccttatgtgcagacataattaaaatgattgacactcattacaataataattgtctgcatctgttactaactgccaaaaagtatcatcggcacaaagctcatcataatctgaaacacccctaataagtcccatcacagcaccatttgaatttcttattgttctattttgaatagcaataattaattcatttacatattccttatactgtttcaaatattccattgtagcattactttctaagcacatagtatcaatatatgcatttatagcagtcaactttccttctaatatatcatatttattcatatttccttctttctatggtaacggtcttgtatctaaaacccagccatcatcaaatttctcaaataatatctgtagtcccccaccaggtcttgattctattgctccaacttgttcctttgcagttccaattgcatatttaatttttgttcctgctggtattttagcaatagacacattatctcttgctccccagttactcaataacgccatttgattcatgtagtcatctactgtactaattctatttgctgcatcaaaagtagtccagtatttcaaacttcttccactaccaacttcagcattagaatgaaattgaactaaatacaaatcttctttaataacgttttttatctcatatccagcattaaagttagctaattcaccatcaaattgtttagaataatcccatactttacctgatgaactaccactctggtatgctaaacacataggaagcaaagcagtctttttctatctattgcttttatttcattcctataccacaattatcctgtaatagatagaggtgtgcgtcaccactcttgaagcacttgtgacttcgttcattgagactgctccctctgctttgcaggattttgcgtattagctggatgttggcagcatttgtgctgtacttcgtatatctaaccagattgtaacccgcattgaagtgaggattctatctacttacaattcacattagaaaggatttcaattatgtacatcgtaggcattgatattggcaaaaatcatcatgaagcatccattgtttcacctaaaggcaaacaaatcggccgttctcttcgctttgcaactacacacaaaggtgcagattctcttatgagctttatcttcaaaaacatcggtaattccccttgtgtatttggcatggaagctacaggtcattactggtatcccatttattcatttctaaaagcaaaaggatataccatctatgtaatcaatcctatccagtctgattctttgagaaaaatgtatatacgacaaaccaaaaacgattcaattgactcttttttaattgcagaagtgatacgattcggtcagtttaccaccacttctatggcagacgaaaacattcttgctatgcggcagttatgccgttaccgtgattctgtgatttcttccagaaccgaaataaaactccgcatcagcacgattatggagcagatcttcccagagtatgaaaaacagttttcttctctttggctgagcacatccatgggcattcttgaaaaatacctcacccctgagaacattgagaatgcaccaatagatgagctctttgaaatcataaaagataagagccacaaccgacttaccagagctaaagccatttccatcaaagaagctgcagctgatacctttggtattaagatagcacaggatgctttctctttccagttaaaacagctcattgacagaatgaattttcttgataagcagattgaagctcttgactgccagattcttgagtactacgagaagtttgattgttatcttcataccattcccggaataggcatgattgctgctgcaaccattcttgctgaaatcggtgatataaacagatttaagagttcatctgccttagttgcctttgcaggtattgatccaactgtacgacaatccggtgaatttagcagcactcataatcacatgtccaaacggggttcaccttacttacggcatgccatttttctcgctgcaactacctgttctttccataacagtccgttgaatgcatattacaaaaagaaacgtgaccaaggtaaacatcacttaactaccacaggagctgtagcaagaaagcttacctccgtaatctatgcagtattacgggatagtaagccttatgagcctaaaagtttttgttaatgtctggtagtaagactatgatttaagcctgcctgtggggaggcttagatgtgatgctcatttttgtttccatattatattcacgttttcctgctaaacactctaagaaatacatccactcatctttgctaacctcttcttcgccactggcataatgttttaatgtaaaaaaagcatctgttatcagttcctcatctgagtcatatattttttcacaatcaaaatcgtcaattaaatattccattaatacatttttatctatatcaccttttactactttttctattattttttccatttcattatgatacatattaacctcctaactaatgtcccttgtttatcaattgtcccgatgaaattcttacagcatcaaagtctctgtgaataatatatcccctggcatctgtaacttcatgaatcaaatattttgttcctaattcatcactatatttatatacaacagaagttcctccttcagtagatgcacgggaactcattatccttttattcaacggtgaaaaatcttctcctctagcttcaacctgtccaattttatctattgtggctttatctgtataaaattttccatttcgattttcaatattagtcagaaaatctgctgtagtatcatattttccacttgacttcccatagctggtcttactattttcttttatcaaaagtcagtagacattttacatctactgacttttacataacataaataatctacacctaatccgagtcacaaattaccaaatatcaattctagatacttcaaactgaatacacatcccatttgacatatcttttgggattttatcttcatcaatatgtaaattaaaaccctttacctcaacaatcccattctgcatatcttttaattcacctcttaacttatacttaaattcgccttccattttttcaataatattgtcctttgtttcacacaatataatattatctgtatcgagacattctaacggttctcctaatacatctccaacatcacatgaacatgggcatgaaaaacaaactaaacaatctgtatcacttacaacttttaaaactgcttcttctccccctatatctaaccagttaatttctttaatgcgcatattttatacctacctttcaaaccctaaacttggtgctttcttaattaattcagagatgttttttatatggaatgtggttatatctcctgtagtacggtcaagccctacaaaaccatatttttttccactcataaaactcacataaccatttaactctggtgcatatgttccattgtttattatgtaatttgcatcatctaagtatttatcaatagaatagttggaatcacctaaaacatctgcaatttcttgaccatgtttgccataatgttcatctaacaaggattgatttttaaacaatttattggtcttatccagtcccttgtctgcaagtagtgctgtcacaacttccgttactatatatcaggacgagtacgcaactcccttttcatctgctgtgtcacatattgactgcccgattcctccaatggtatttaccggatctttgagtcgcggctcgtacttttgttttatcttttccacttcctgatccagcacctccggaacctgtatcggcactacagatttccacctgacatccacatatagagttcccaaatctactacaagtgtcaaaagtcccataacagttcctgcaaggctgtcccacacgcctgtcatgaaatccttgattgcatttcctgcatcttcttcctgttgctgggcagatttttttgcttcattttcttcgtcgctgctaaatggattgggaataaacagccgcttgtaggttgccagtgtgcttcctgtatcctgcacaatccagtcaaaactggtagcctctccctctatctgcttatgttagttcagtaggattaatttttttactttcgagtcctaaagtataaccctaataaatattacttttaatcatattcaacatatatatttttttcatttctaacagccatattgataaaagagactaattgctcaacaacttccttagattttttgataatttcttcatttctcgtatctaataacttttcattaaatctttttaattcttccaatacaatatgtggatatttcatctcccatttttcatcatagaatccatcttgattaaaatagcactcaataattccatttttctggaattctgaactaaaacacccctctaaaattgtattaaaaaagccaatccaaataactataccatcctcattgccgttttcttcactccatacttttacttctccttcgccttcatatccttcataataccttgtatccaacatatgcttactccttccaatgtcctttatccaacaattcaatctgctcttgcgtagctgttccatttttccgagcgcttattgcatcataccatttccatccttcaacccattcattttcaccaattaaaaattgtgtcgatggttttttgcctccatttccaggaattgttctttgaattacccaagtattgccttgtccttctggtgcccccgaagtacgggtatgccatctcacttcgtacttatatgttccatcattccatttgtaagaaatctgttcatatccatccgccatagattttgctttatactttgcagtatcaggaatttctattggtgcctttttcctatacctttctactattttaactatttcactttctgtcatatcagaaaatttaaaaattttaccaccactctcaacaattttcccaacatcttccgctacatttccagcgccctcggttactccatcaatcccttttggggctttcgccagcttgttcgcctctgcttcaattccattcagcccctttgcagttactccacttgcaaccataccggcaaccattcctgctgtatcatttcctgtcacatctgtggttatcttctgcgcaccggctccggctcccattgagatgccttctttggcgactattgttgctgtgcttttgaatgtcagatttcccgctgtagatgcatgcccgattggaatcattgcggatgccgcaaatgcaaaggcattttctgtcagataatatgcgtcctcgtttccctgaaacaggtcatcctttatgccgtttactgccgtgctgtcaatgtcacctgtgcttccataataaatatcctgagtgccctctatggcatctgcagctccgaatactgctgttccgcttcctactgctactgcaacgtcagctactattggtattgcagcacctcctgtcagcactatgcatgctacacccgtcgcaattagtactactcctccaaccgtcctccagattccctgtgtctttctcttttcggcttcatcctttatcttctgttctgtctcatagatttcatcgtatgcttctttattcttctcatgcaggtctccaaatattttaatgcccgtgttcaaggtacctgcatctttacctgtgataaaactgcctgtttcatagctctcaatcgcaccctggctaaggcctatttttgaaagacatgactgcagattttccagaagcagctctactgaattttcaagccgtaccacattttctctctcgtagctgtttacatttgagacaagctttataaggtcgctgtccatctgctcatggatatcaaatactccgttactgtccggcatgcccacatcagatatgtccgatacttctgaaagtgcacttcttattttgcccgtatactcatcagtatcctcatagtttgatgccagttttttcctgaattcctgtattgcttcttcatccagtttgaagttcgtcgagctatcaatggcacggtatccatccttgtatgctgccatattgtcaagcagtgtctgtgcagttactttaatgcctgacaggattgttatatgtgcttcaccaagataactctttactgcgtctccggttttccctgtaaatactgcattttccgtaaacatattgattttttctatgcagttatcaatattttcaattagattgtcaatttttcgcttatattcccagaacagatcactgagatccgtataatttatctgaaacccttccattttcatctcctagttttatggtatcacagctgtatctgatagtccaataccatttttaatataatctccctgttttctgtcattttcatttattgcatttattatcaggtctatttttgccagatcattatttaaagtatctctgtaatctttcacaaaggctttcagctgcctgtattcttcctgaaatttgtccattgcttcagatctgcttttgatttctgtctctgccgctgtgagacttacggaatcagaagctgtttttataccggcagtcataaaagatacctgcatattatcaaggctgatttccatctttgtatttctcctctcacttttattaattgaaaaaattctgtattttcgtgcacagatcatcccatgcgttaacaagtcctgaaagcacaccatatttttcattcactttttcttttagtgtatttatttcccaattgatggcatcctccgctgcatctatattcgacacatatccgtcataagctgtatataaatttccgctctcacatgaatcataacattcctgtgcattgctgcctgtccacatgcactgataaaggtctgaatttatcatattcctctggttatgcttgatatcatcaatagcctccttggcatcatccagcttcctgtataccgccttcagcctctctattttctcatcaagcacatctatctctgactggcactgttcctgctgttttttattgtcagctttctttttcttcagtttattgtattcttttctgtcattcttttttgccatatcagttcaccatgcttcttttgagttttcttacatctgcgcgctctatttctgttttctccatggcattaaagatgttgtcacacatcattatctcatcatcatctacatacccttcaaacacaaccctgctgatatctgtatgctgaaaatacataagcctgtcaccattcattccctcaggatatggacaggcagcataatcaaacaactgtttacagccatttatatttacctgcagtgctcttgcaacaatcacaaatttttttatgccaccgcttactactacaatgctcccaagtggcagaaaatcaaatttttcattcatatcttttcacctcatacttcaataaacttttcatacatacaaaaaagctgcagcaaccggtattcaccggttgttgcagccgaactgtcattactacatgtaactgttttagactctggctttgcgaccctatgtttccataagtgtgcccttatggttaataattttattgaatttgcacatttttgtcaatatatttttctggataaaatgttaaattgtcagctgcagcaccatttttgccgcaagtgccagcatccatgccttggcattcgcaaagccttctgaagtattgctaaactcgaatgccccattacttaattctcttcatctgacatcgattgccctaatataatgagtttcactgcctatatcgcatcctgctataagcatgtcatccgtaatgaaggagagtttatcattcttagcaaacttaccatttgtttccaagtctcgccaggtataggatctcagttcttttttaatcacccttttcccgattggttacggcagatattgccatttctgcaatacgagacatactcaaacttattgattgttcgtccctttactccatctccattacagagacttcttcactactatgggctcggctgacttctcacagttcgttgttactaggctgatgaaacctctgtgagacctccacgcttaaggtgcacgctctttctctccatatatccgccacatttactctgctactacaaaagtgatagttattagacttcgttgctttaagccaacttatctctcgtagcctagccttatatgtgatttctgttcgtcgtaccagagatttgcttacagcttccttcagattctacctcacggtagacacccttgctgttcggctatacacttcccactatctaggagtattcgggacttgcacccgttagagcgcgcccatggcgcgcaaacttaaaaatccgctatactcacctatcgtatagcggattaaaaaaacattattcaattttcatattatttattgcgttaagctattgtgccatttgcaatgtcgttctttgcaaataaatatgtaataaccggcataagaatggctgaaataattgctttgacaatattaccaacaccaagctgtgctgtaacggcatatgtaaccatacttacaataaatcccagggctgcaaatgcaaaaataagcaccaaaccaatctttttgtgtgcgaaaagcaaaataccgatagaaacagttatgacaatctgtagtataacgccaatgaaactcagtacgacatatatcgaacctaatcctaaagcagctcctacgactgaagcacccagtgcaacgacaataccgccaattgctgcaagaacattcaccacgaaaataatccataaccatacggttaaacctgttgaaagcttattgttttccataattatcctcctttagtaatcccaattttatttcaacatgttcattataatgtacttgaaaaatatttcaatagtcaaaaggtctcattttgaaactttttacatccgggctaatcaaaaatatcattgatttaaatgacagatgcatttacaatatagctattatgaaaaaattatttgtaaaatatgtctcacaaaacatactcggcatggtgggtatgtcattatatatacttgccgacaccttctttatatcaaaggcggtcggctcaaacggtatcaccgcgctcaatctggtgctgcctgtatacaatttgatttttgccataggcgcaatgatcggagtcggctccgccatcagatatgtcgtagagaaaaataagggcgatacatccggcgagagctacttttttcatgccctgctgtggtgtattatgataagcgttatattcatattgatcggtattttcatcccggacaagctcgtagggctgctcggcggagattcggcaattataaataccggtaaaaactatacacgtattttcatgctttttacaccgtttttcatgtgcaactatgtgtgcaacgctttcgtaagaaatgatggtgcaccatccattgccatgtgcgccactcttttcagcagcctttttaatattgtttttgattacatactcatgttcccgcttggacttggtatggagggagccgctttagctaccgctatttcaccgattataggcatcctgatatgctgtattcatttctgctcagacaaatgctccgtaaagcttaagccgacggttccatctgtcaagagactcttttactcctgccaggttggtgtttcttcctttgttgctgagatatcatcaggtgtcataactattgtcttcaatatgattatcctgaggcttgcaggaaatatcggcgtggcagcatacggtgtggttgccaatacgtcactggtcgctgtagctttgttcaacggaatagcacagggttcacagcctcttatcagcgactattacggcagaggacttagaaaaaatgtaggctcgatactcaggatggctgtcgtttcatctctcttaattgcttcacttctcattttgttcatatgcacctttgcaccttttgtgacatctgttttcaacagcgagcacgatgccaggcttgcttcgtatgccgagagcggactgcgcctttactttacaggctttatttttgccggaatcaatatagtaggttctgctatcctaagtgccgttgagtccgtaaaatatgcattcgcggcatctatcatgcgtggttttatcgctataagcattttcgcattcgcactttcagccgcctttggcatgacaggtgtgtggcttgcttttccggcagctgaatttgtgactatgtttattattgttaagggattaagaaaaaactattctaattataatagataaatttttttcaaaagtattctttatgttggaaatcaaacatacaagttgtttttataacgctattattctatcagaaacataaaaaactactgatggaggaaaaaaatatgttttgttttcaatgtgaacaaacggccggatgcactggctgtaccggaaatacaggtgtctgcggaaaaaaggcagatactgcacagttacaggatgaattgacaggcgcactgattggtctggcgagagctgtcgatgacacatcagctgtttcaaaaaagacctggcagaccattatcgagggcttatttaccacaattacaaatgtaagctttgataatgcagcaattgaagatatgatacaaaaggtcagagcagaaaaagactctctggttggcgactgtaataaatgtcagtctccttgtggacgaactgacgaatatgatatgcaacaactatggaatgctgatgaagatatccgttccctgaagtcacttattctctttggtattcgcggaatggctgcatatgcctatcatgcatatgtcctgaattttgaagatcccgaggtaaatcagtttttctgtgaagccttgttcaggattggttacgcagaaagtatggatgagctgcttcaaacagttctcaaggtaggtgaaatcaatctaaagtgcatggcacttctagacaaggcaaatacacaaacctatggaacaccggagccaacagatgttacgcttacggtggaaaagggaccttttatcgtagtaaccggacacgatttaaaggacctgcagcttttgcttgaacagacaaatggaaagggaatcaatatctacactcatggtgaaatgctccctgcccatgcatatccactcttaaagaaattccctcacttgaaaggaaatttcggaacagcatggcagaatcagcaaaaagaatttgatcatattcctgctcctattctctacaccacaaattgtctgatgcctccaaaaagcagctacatcgacagagtgttcacaacagaagtggttgccttcccgggtactgttcatatcgatgaacagaaggatttcactcctgttattgaaaaagcacttgagctcggtggttacaaggaggatcagaccttcacaggcataaatggcggcacacaggtaacaaccggttttggtcattcagcaatcctgtcccatgcggatacggtaatagaggccgtaaaatcaggagctatccgtcatttcttcctggttgccggctgtgatggtgccaaaccgggcagaaattactatacagaatttgtaaaacagacgccttctgacagtatcgtcctgactctggcatgtggaaaatttcgtttcaacgatctaaatctcggagaaattggtggtcttccgcgactgatggatatgggacagtgtaatgacgcttatggcgcgatacaggttgcaatagcacttgcggatgcatttggatgttcagtaaacgagcttccgctttcctttgtactctcctggtatgaacagaaagcagtctgcatcctcttaacactgttacatcttggtataaaaaaaatccgtctcggtccttctctaccggcgttcctttctcctaacattctgaactttctggtagaaaactatgggattgcacctattaccacaccggaggaagacatcaaagtgctgttgaaacaataatatgtattttttccgatgttctaatacactaatatggaactataaaaaacacaggatatagcgcctttgctgtatcctgtgttttaaattaactttaaattaatttgcaatcattagggtaatctaagctaattctccccatacatctccggacgcctgtccctgaacagcccccagctctttctctcactctccagctcatccaaatcaaaactgtggagtatgaagccctccgatactctgtccatctgctcaacaacctctccggttgcgtctgtgataaacgaagaaccataaaatgtcagtgcagagctctggtttccgttttctgcacacggtacaacctcctctgtgcctatcctgtttgccgccactaccggcatcagattgcaggctgcatgtccggtcatacaccttctccagtgtggcatgctgtcacattccagtatcggctcgctgcctatggctgtagggtaaaaaagtatctccgcgccctttaaagccatgcctcttgccgtttccgggaaccactgatcccagcatatgccgactccaattgttgcatatcttgtcttaaaagctttaaagcctgtatttcccggtgtgaagtaaaacttctcctgataataatgatcgtccgggatatgtgtctttcggtatattccaagcacctctccatcggcatctatcaccgccactgagttgaaaagctgtctgccctctcccgcctcataaaagctcacaggaatcactacgccaagctcctttgcaagtgccttcatgctctgcaccgcatcattttcagaaagcggctttgcatagtcataataatcgtagcgcctctcctgacagaaatactgtctctcaaatagctccgaaggaagtattatctgtgctcctgcctctgctgcagcccttataagctttgctgctttttcaatattttcttttacgtcacggctgcagctcatctggattgcagcaattgtaacctctctcatactattcacctttctcatcctgtcgtctcacaatgggcttttcccaagcctctgtgagaccgaaaacgattacaaccaattaaattactgtggtatctgctgtgtgatacagtgtatatttcccccgccgacaattatgtcgcgcgcatatatcggatacacttttcttccctcaaaaaggcttccgattgccttaagcgcaggctcatccatcacatcaccaaactgaggaatgagcacaccgccgtttgtgatgtaaaaattcacatagcttgccgccaggcgttctcctgcctcgcgctcatcctcaccctcctcaaaggtgaagcccgaaagctcatattctgtgatacacaccggcttctttggaatgtaaaccttgtgaacctcaatttttctaccctttgcatcagtttcattttccaatatttcaaggtccgctgaggacatctgatactgtgggtcatccatgtcatcagtccacgcaagcaccacatgccccgggcttgtaaatgcacatacgttgtcgacatgctcgttggtttcatcattgtatattccataaggaatccagataattttttcggcaccgagataatcctttaatttctgttctatttcagacttcgataattccggatttctgcccttgctgagcagacagctttccgtcactatcacagttttctctccgtctgtgtggatggctccaccctctaagacaaacggatgcgcatcatacatgtcgtatccggctttgttgcaaaataaagccgctactctgtcatcctttgtccagtctgcgtacagtccgtccaccttgccgccccaggcattaaagcaccagtcgattcctctgacagcgccatcctcatttttcacgaaggttggccccacatctctggcccaggcatcatctgactccatttgtatatatttcaccgggaaattttcctgataatttttctgctttctgacagcttccacaacagaccttgcattgtctatcacatctgcctcagcgagcacatatgcctgctcagactctgctattgcacatatcacctccgcaaaagcctctcttgcccgcctggcaccgtaaatccatgagcccgggcgctttggccagatgatgatggtacccttatggggagcatactctgccggcatataaaagccgtctgctctaggacagcctgcatttaaaatcttcatattcgaatctcctgataaccttacaatcgttattttcatccattactgcaatgtccggaagcggcatgccgttaaaggtattatttttgaccatcgagtagattgccatatcgcaaaagcacagcctgtcaccgatttttatctctctgtcaaatgaataatcccctatcacatcacctgccagacaggtacatgaggacaatctgtaggtatacttcttctcacccggctcgccactgtccataagcggcggacggtacggcatctcaagcacatccggcatatggcaggctgcggaggtatccagaatgagtatctttatgccattgttttcaactatatcaagcaccgttgtctccagatatcctgcatcaagcgcaaccgcctctcccggctccagatagatttccaggtcgtatttgtcacgcatatgcataatgcatttttcaagcctctcaatgtcatagtctgcccttgtgatgtggtgtccgcctcccatattgagccacttaagtccatacagcaaatctccgaatttctcctcgaccgctgcaagggtcgtttcgagcgcatccgaatcctgttcacagagcgtgtgaaaatgaaagccctcaatacgtgataaatcaagcccgtttttaatagccttatcgagtgcctctctcgttatcccaagcctcgagcccggcgcacatgggtcatatatctcatgcccctcctgtgtggagcactcagggtttattctgagcccgacacttatttttttatcagccttttctattttatccctgtgaagcagatactgcgatacggaattaaatacaatatggtcacatatttctaccagctcatccatctcctgcggcaaaaaagcgggacagaatacatggttttcctttcccatttcttcatgtgcaaggcgggcctcaaaaagcccgcttgcagttgtcccgcttagatatctgccgataagaggatattcataaaatgcgctgaatgccttctgtgccagaagaatccttgcacctgtcctttgcatgacaccgtttaatatcaaaagattttcagttaattttccctcgtctatcacataacagggagttcttaattcatttatcttcataccggcctccggactaatccatatgtactgactcatcctcagtcttgtagcaatccacaggaaccggattctccactacctgccaaggcagtccgaacttattaagagcctccatgtatggatccggatccatctcctcgagattgaacactcccggcttcttccagagtccctttaccaccatcatggctccaatcattgccggcacacctgtggtataagaaatcgcctgcgattcaacctccttgtagcactcctgatggtcacatacattgtagatgtagattgacttttcctttccgtccttgacacctgtaaaaatacatccgatatttgtctttccgactgtacgaggtcccagggatgcagggtcaggaagtaactccttaagcacctgtattggcactatttcctttccgtccaccatgatcgggtctgtccttagcatgcctacatcctcaagacacttcatgtgtgtgagatagctctgtccaaaggtcatgaagaatctgattctctttattcccggaatatttttggccagcgactcaatctcctcgtggtgaagcagatacatatccttttctccgacctggtcaaaattgtactgcgctctccactccataggctttgtctctacccagtggccgtctgtccagtatgagccgttcgcagaaacctcacgcaaatttatctcagggttaaagtttgtcgcaaatgggtatccatggtcaccgccattgcagtcgagaatgtctatagtatgtatttcatcaaaataatgcttaagcgcatatgcagaataaacagaggtcacacccgggtcaaatccgcttccaagaatagctgtaagccctgcctccttaaatttctcctgatatgcccactgccatgaataatcaaaatatgccgtaaatccaagctccttgcagcgcttttcgtagattgctctccactttggatcctcagtatcctcacactcatagttggcagtatcgatgtagtcaacaccgcacgcaagacatgcatccatgattgtaagatcctgatacggaagcgcaacatttaaaaccgcatccggcttgtatgcattaatcagctcttttaattcctccgcattgtcggcatcaacctttgcagtctcaatttttgtgcttgtctttccctcaagctttgcctttaagtcatcacattttgacttggttctgcttgcaatcataatctcggtaaatacctcgctgttctggcagcattttctgattgccacctgcgcaactccaccacatccgataataagtaatctgctcatttttgtccctcctgattcgctttggttatgatatagtttttctaatttgttttactttgtttcctcttcctcgagtaaatcctccacatatttcggaagcatgaaggctcccctgtgtaaatgtgttgtataataccaggttttaagccccagtgcatcccatctttttgcatccagatcataaagcggatgatatttcttcgatgcaaacccaaacagccagtagcctgacggacaggttggaatatgtgcctgatataccctgcttataggaaatgatttatacacctttctgtgcattttccggcactcaagctcatcctcatcataaaaagggctgccgtgctgataaaccatgattccatcatcctttagtgccttataacagcttccgtaaaactcttttgtgaaaagtccctccgtatgtccgagtgggtctgtggaatcgttgattatcagatcatattcatcatgctttctgcgtaagaatcgcagaccatcatcataaaacatggaaattctttcatcctcaagtccacatgctacctcggggaaaaaccgcctgcatacatcgacaaacatcttgtctgtctcaaccacatcaatatgctcgacagacggatatttgatgagctcctttgccacgccgccatcgccgccacctattataagtatcctttttgcattcgggtggaccgccatcggcacatgtgtgaccatctcatcatatataaactcatctgtgtccgaaaaaacaatctcgccatccagcgcaaccattttgccaaactcatatgatttaaacacatctattttctgataatcactctgccctgaaaaaagctgctcctgtatccttacatccagcttgacattgacagtatgatattgtgaaaaccacatttgcatagcttttcctcctgtttactgctttaataccttaagatattctaccgcaggatcctctgttccctgcattgaacagcccttttcctttgcgtagacaatgtattgcgcaatctcttttgtgataagctctcccggtgcaagaatcgggattcccggtggataacacatgacaaactcaccacttacagcgcctaccgcgtccataatgcgcactgatttcttctgcgaataaaacgcctcctgcggcgataccgccacctttggatttatgtactctcccgacaaaagtccggtcttgtccttgctgtaaaggcgcttgatatcctccagcgcacctacaagcctttctatatcctgtattctgtcaccaattgatatatacgcaagtatattacagatatctccaaactctatctggatatcatactcatcacgcagcagatcatatacctctattccggcaagccctatatcgagcgtatagatggacagctttgtcacatcataatcatatatgctcgtgccatttacaaggtcacgcccatacgcataatagccgcctatggaattaatctcctgccttgcgtactccgacatctgtgccaccttggcaaaggattcttcgcctctaagtgctaaatttcttcttgatatatcaaggcttgacaatagcagatacgatgcgctcgtggtctgtgtgaggttgataatctgcctcacataatcagcattcacatcccttccggtgagcagaattgagctctgtgtcaggcttcctcccgatttgtgcatcgataccgcagacatgtctgccccggctgccattcctgatatcggaagcccctttccaaaataaagatgtgtaccatgtgcctcatccgtgagcaccttgattcccttcgaatgagccagcgcaactatcgacttaaggtcagaacagattccgtaatacgtcggattgtttacaagcacagcctttgcatccggattttcctcgatagccctcgccacctggtcaatctccattccaagcgaaataccaagcttcgcattcgtctgcggattgacataaaccggtatcgctccgcagagcacgagtgcattaagagcacttttatgaacatttctcggaagtataatcttgtctcctgccttgcaggtggacaaaatcatggcctgcaccgcagaggtggtgcctcctaccataagaaaagcatttgccgctccaaaggcatccgccgcaagctcctccgcctctctgattaccgaaaccggatggcacaaattgtcaagcggcttcattgaattgacatcaagccctacacacttttctccgagcagatgcaccagctcaggatttcccctgcctctcttgtgtcccggcacatcaaacggcaccactctcttcttcttaaactcctcaagagcctcataaatcggcgctctttcctgtcttttgatatccatttacttctcctgtatttaaaaaggatgatgcgtgcaagcatcatcctttagattcgtcttaacaacagtaaaatcgtaacatatactatggagttatgcaagaatttacgttttatttttgataatgatagttacgccattgcaggctctttcttcttaataattgcctcaacttcatcaacacctgtttcagctacatctgcgatctgatccaatgtataaccctttttatacatattcagaataaacttttcgcttgtcttttcagtagctctttcttcaattcctgtactcagattacacataattctcacatcctctctaaattcttgattaattggaatattagatacccgcattttccggctccattcctttaaattcatagactgaaaggctctctgtcttaatatcattataagcgagggactttacggaatcaactgatttttcattacttactattaaagaggaagccggtacatgtggagtgcaccggctaaaaatatgaaaaagattaatatgagtatttcttttgtttacaatgtcagtatacggggcaattgtgaaaatgctgtgtttactttcttactcttttataaacaaaatattaatgcaacacaacaaaagagccctttcgagctcttttgctttgtacaacattaaattgtagatgattactgtaagagtgaaagtacaccctgatttgactgattagcctgtgcaagcatagactgtccagcctgtgcaagaatgttgttcttgctgtagttaaccatctcttcagccatatctgtatcacggatacgagactcagctgatgtagtattctcaactacgttgtcgaggttgttgatcgtgtgctcaagtctgttctgaatagctccgagagctgatctctgtgaagaaacctgagaaatagcatctgcgatagcatcaattgcatatgttgcatcctgctccgtatcagccttgatacccttaattccaagtcctgctgaactcattgaatcaatatcaactgtaatcttatttgtagaatcagcatcagctcctacatgaagattgaatgaaagagcttccttaacatctactgttccttttgttatatcaaaggttccgtttccgttattcttaacagtggctgctgtatctgcaccgatagaacttgctgtttcaagctctttagccatcttgctgtaagcatcctcaagagtgattgaatcatcatctgaagattttataattgcagtaaatgtatttgcgccaactttaactttgtcgccatctttaattaatgctaaaaagtcatcctgcgtaatctttccagcagctgcatctgtagttttgtctaaagtatattgtttagatccaatgctaattgtagttgttccagcggttccacctgcaactgctgctttgatttcatcatatgttttcggagtttctgctgtaactgtctttgttgttccaccaacagtaactgtatctccagcttttattccattctgtaatgctgtaataccagttgcatctgcaattgacacttcattttttccaagatcatcaactaccgatgttccaactaatttagtattagcatttgatacaattgtacatccatccttaagatagtttgcaatatcagctgcttttacagtatgtgctgtttcatctgttgtagccgcaatagtccactctgttccatctgcatctttaaatttattaccatctgaccatgtagcacctgtagcagttgctgttgttacttttgcaacaatacttgtcgttgtatttcctgatgtcacagaatcaccaataccaactgggtttacagctgtttcacccttcttagcataatctgctgaatctgctgaatttccaattgtatattcttttcctgcaatcttaactttgtcacctactgctaatgtatcagccttaaatgttgctgttccatttccgttatctgtaagttttccagcaaggcctgcatcatgtgcattaagttttacctttgaagtagttccatcagtatttccttttaacagatatgtctcgttgaactttgttgtctcagatacacgatcaatttctgttgtaagctggtcaatctcatcctgaattgccttacgatctgttgtagagtttgttccgtttgcagactgtgttgcaagctcattcatacgctgaagcattgagtgaacctctgtgagggcaccttctgctgtctgtactgctgaaacaccatcctctgcatttgttgaagctctgtcaagacctttaatctgctttctcatcttctcagaaattgtaagtccggctgcatcatcagctgcacggttgattctgtaaccagaagaaagcttctctgtgctctttgactgtgcgcttgttgttacgttgagcattctgttggcatttgctgcctgcatgttgtgttgtactaccataatataatcctccttgtcccatattcatgggttattatgtttgacctctggaaatccttttcccgagggttttgcagctgctttgtgtttatttttatttaagcagttgcggttttctataacaagcggcttcccgggtgtggcagatgccacagccgcccattaacatggttagttgctttgcgtctttttctgacgcgctttttccttccaaatgatgcgctgtatttctttttgtgcctcattggaaatctcagggtcgggataatatgtatcttttcgcttcgccgggtccggttcgttgttggatcttgcgatattcagttcttttggggcatctatcagtaatcgacagtgctttccggttccgcccgcgaacacgattcggatatcgtctccgatgttcacatattgcccttcctttaatgataatttgagcattttctacctccatgcactagggaatagctttgtccatgcttttccaaataatgtaacattttgtagtaaaatgttgcattttttgctttacacctactatatcggacgccattttcagaacttaacccctaaaaaataattttttcaataattttcttttcatttttctatgtttttttgtcagtcttaccggatttaatcatatctgtgctaaagataaagtaattcttgatgaaatatgactaaattggcgtaaacatttgatgttttttaatccacttcctttttgacccattatcaatccacgaaaaatgcaacattttactacaaaatgttgcattttttctattttgaacttaccattattgtgttgtggattttggatattctgagggtgaaagtctgtcatattgtacgtgccggataacattttctactataaaggagtattcaatgggaactacacagccaatccgaaacaaggacgaactcacggctttcaggatgtactataaggacatccgtccaaacagccgcaattactgtttaattgtgatgggattaaacacagcactaagaattagtgacctgcttagattaaagtgggacaacgtttacaatttcgaacatcatgaatttcgcactcattttcttatcaacgagcaaaagaccggcaagaataactatgtcactctaaactacaatgccaccgatgctctgaaagattatttcaatgaacgtaatccaaatgaccatgaatttatttttaccaagaatacctgcagataccagcctataagcaggacgcaggcatatcgtattgtaaagactgctgccggcaaaacagtgcaggatgagcacatcagctgtcattcgcttagaaagacgtttggctatcacgcctggaaaaatggcacacctcccgctctgctcatggatgtttataatcactcatcatatgagattacccagcattatctgggaattgagcaggatgagagggatgaaatttatcttaagcttgaattatagtaacttctattccgccggccaggattttctgagagccacataggaaatcaggaaattggcaagccagccggccggtacagcaagccagacaaatgcaataccgaaacgcggcgcacagattaaggcaaccgacaggcggattgccaggtttaccatattggcagcgagaaacggacgcatgatgccaagtccacgaagcacaccatcggtggccatcttgatacccataaaaatgaaaaagaaaccaagccatctcatataatctccggatacctgatatgccagagccgttccgtctttgcccaggaataatgaggaaatctgagtatgcagtgtttcaattactataaaagcaagcactgcaaaacacaggtctaacaccagcgcagcgtgatagccttttttgatacgttctgtcttctttgctccgagattctgggaaacaaacggagaaactgcatttccaatggatacaaatatcagtgaaaatacattctcgaccctcatcgttgccgaatatcctgcaagcgcctgtgtaccgaacggattcacaactgcctgtactatcatcatgccaattgacaccgtagactgctggagaaccgaaggcacagcaatccgaagcatggaatgaagctcatgcctgtcaaaccattcaaagcgacttttataccggcgcatacggctaaggaaaatcaaaagtgaaaacactgcagatattccctgagcaattagagttgcaagggcagcaccgaacactccaaggtcaaggcctgccaccatccaaaggtccataaatatatttaacacagaggaaaatatcaaaagccccaacggaatccttgactcgccaatcgatgtaaacatcgttgaaagtatgttgtacataaacaaaaagggaaatcccacaaaataaaccctaagatacagcactgcctcatccagtatatctgcaggtgtctgtagcaagctcatcattgaatgtgaaaagaaaaagccaaagacacccagaagtacgcttaaaaccagaaaactaatcagtgatgttgatactattgttttcattttgctgtaatccctggcgccgaaatagcggctcacaagtacaccggctcctacaccggctcccagtgctatacagatgaacacattcgtaagcgcagcacaggctccaactgccgcaagtgcagaggagcctacaaactgaccaacaatgattgaatcagccatattatatacttgttgaaaaaagctgcccaaaatcataggcattgcaaaaactgtcagcgcctttaacggggcatctgtaattaaatattcatcttttgacattatttttccctcattccgctataattaagctatagtatatccgattgaaagacaaattacaatatagcattctttatcgacatttttccatttcttatgctttccctctaatgcaaacatcatactgctcctttgtattttaatttaaaaagccgcccaggccataggcctgtgcgacttctcataacatgatttaaattaagtttatccttcaatagcaatatgctttgtggtctcaactttcttttgctccttcttcggaactgaaagtttaagaataccgtcctgatactttgccttgatatcttcctgtttcagctcatcacctacatagaaagacctgctcatagcaccggaataacgctccttgcggatatacttgccattcttttcttccttttcttccttgtcaagtcctttagctgcgctgatagttaagtaaccattctccagcttagcctcaatctcatccttcttgaatcccggaagatctatatctacttcgtagctattgtctgtttccttgacatcagtcttcataacgttctttgcgtgtttaccataaagcaccttgtcaacatcaggaaatgaaaaatccatccaatcatcgttaaataagttttctccaaaaatactaggcatcaacataagtcatctctccttcttaatatataaaatctgtgtcaacctgtttctttggaaccgggatgtttcaagaactcaaagcctttgctttttgttcctttcctttgttcttgactatgttatacacctattattagcactcgtcaatagtgagtgctaataatttataaaatgtttatattttccaagcagcttcaaagtacttaccatatggaactccattattttgcaataaataacactccgagtgtgccaggcccacaatgtgatgaaatcacaccacctgctcttgtctctataatttccttaaaaatgccaagagaggctatgtaatctctcacctcttcaactgtattagcatcacattccgaatgtgtaataaatacccgatccggtattgcgtttttcaggtcctcttccagatcttttgcataattctttatgactttaccgatcttacctctatatttcctgcttgcatccattttaccatcctttacaacgatcatgggatgaagcgccaatgctcctcctataagcgcagaaacagcattgcatctgccacctctgtaaaggtacacaagtgtatctacaacaaagcttgctcttaccttcgggatcaattcatcaattccggcttttatctcctcacgggatttaccatccgctgccataactgccgcctcaacaacaagcaggcctattcctgtggacagatttcttgaatctatcaccgtaactttatcttctgcatcaagttcttctgccgccattctgatcacgttgattgatgtcgacatctcacttgatatggaaaagcatattatctccctgccttcatcaatatatggccgcattacattcattgctgtttctatagatggagctgaagtctttggtgtagtcttatttttatcagcccactcatacaatgcgtgaatgtctacctgcggtccgtcctccagttcttcatctccttttacaatatgaagcggaataatatctatatcgtatctttctaaaacttcctgtgacagatcacatgtactgtcagatataatttttaccattttaacacctccaggctttcaaaatcattttgtccttcctttctgttccattatactatcttattttattatttcaattgcggaataaatatattattttcatgcccatattcaatagttacatattctttttattacagtatcaaaaaaagatattttcaccaagggggaaagcaacgttcattttactgttgactggctccgctggctttgtgatattgccttgtagtaaacacaaatagaaatgattgctgtaatcgcttccgtgatccaaaacgcattccagacgccaaccgctccgaaaatgctgctgagtaaaaacgcagttgggatgataaccacaacataccggcaaagtgaaatcagtaacgaaggaatgccttttccaagtccctccagtgcgccggaagatgtaacggaaaccgccgagacaataaaaccggcgccgatgatacgcagggctgttttcccggtctggattgtcgcttctgtgtgggtaaacagccccataagctggccggggattagcagacatatcactgttccaagcaccataatgataccgctcatgcacaagacgattttataaatctggctgactcttttattctcccccgcaccgtagttatagccgatcaaggggcgcatcccctgaacaatgccattagccggaagatagatgaatgtctgcaatttgtaatatattcccaaaaccagaatatacacttcggaatatgccgccaaaattgcattgagcgccgaaatcaaaagagatgggagcgcaatattcaaggttgcgggaatgccgatggagtacagctttattaccatctttttgctgagcaaaatgtactgcctgcggatatgcacgcgaattggccgcacaaaataaacgaccagataaatcgcaagcgtcaaggtctgcccgatgccggttgccagcgcggcgcaaccgccattttgttatttgtctgcatgctttccctcttctccacaaattgtccgaacattatagtcctccattctgctaatacttccgagttacaagcaacaaaaaagccacacaactatcacaagatagctgtgtggcaaaaagatgaccgaatccggaaaagtccactaaaattttgcgtttatcattataacgaacttgaaggagactgtcaagcagcaatcattacggaactatgcagaagagagaaactatatctctctacatgcttattaatacacataaaggtacatcgaagcaaaagtcccagataagtacctacataacggccacttccttttacattatcaagaataacataatcttttccaatttcagttattgcctgccttctcaactgagcatgaaaataagaagtgtcttctggaagcgaatcatacaggcagtaatcaatctgataaaaaagccggtattggatttttatgctgattctcaatagtaatgcgagcatgtttatgaaagggcattgcaaaataagaattaagtcatcgtgatggaacaacagttgttatttaacacacaaccttgcacactttcttaaagcatgcaatcccatacttgataaagttatccataccatcctgctttagctttgccacataatctttttcctcaatctgctttaatgccttatcacaggcagcatccaaatcaccgtcttcagcgtacttgagttctattacaattcctgttctgtttgtcggtacttccacaagtatgtcactatagccgattcccgactcagcattcgatttgataagccagtttgacttgtaacccaggagtcccagcaaaattccatggtagaaattttctttcttctcttttgcaactgctgtatcacgtatgcttattgtgttccacagatactcaccatatatctgttcaatcttttgtgcatcttcattcacaaacgcactgcaaagctcttcgagtgtttttccatcacttttagaaacatccgaaaaccattcttttatttttttgacaaaaagatttctaatctctctgttaggaattacaagacaatattttccgctttcagtgcggccgttgtgcgtcagataacctgtcgtaaaaagcacgctccacagattttctatgctcttatatatctcatcgtaggtcagctcaggagctacatccttttcaatactctcccctgctatcagcctctctatttccgtttttgtagaaacatcagccatgtcgataaatctgcggacaatcgcatttccgcttgaatttgaccagaaatcctgcggttctgcagtcttgtcatattttaactgatcaacatagtttatgacatcccatggacaataaatatcagccttaccaaaatgatacccatcataccattcctttgtctcttcgaaatgtgatgccaaatcgtaatcatccagtattttcttcacctcattatctgtaaatccaaactgttcatcaaatcttgcatccagaatagacatcactttaaagttattgagccctgtaaagatgctttccttcgtgatccgtaaacatcctgtcaaaactgcaaactgcaggctctcgtttgtctttagtgccattccaaaaagccctctgatgagtgaaaccatctctttatagtaaccattctggaatgccttatccagaggaacatcatattcatcaattaatattacagtcttttgtccgaaatgcttatataataattgagataaaatctgcagactcgatacaagcactttttcatccattgcattcgttccatccttcaatgcaataatcgccttgtaacgctttttttcattttctgacagatattcactatcttccaaaaagccgaatctttctgcctccattcctataagctcagtaatacgatatatggcatcctcgtatttcaatccctccacactctttaatgacaggaatataaccggatatttacccatatgttcttcgcaaagtgccttattttgcgcaatatataagccatcaaacaatgactcatccgcaccggtttcaaaaaaagctttaagcatactcatgttaagagtttttccgaaacggcgcggcctcgtaaaaagagtgacctctccaccggtttcaaccaattgctctatgagttttgtcttgtcaatataataaaagttgttccttctgattttttcaaaactatcaattcctaccggcagttttaaagtactcaccatatgaacctccacaaaacgtatcaatccgctatacttagctatagtatagcggattgaggggcaaaatacaaatattattaccgttctattattcccatttttctatacacaagaagagctctttcgagcgcttttcgattttcattgtaaaatgaatttctaaattccgcatgccctaatgaagacaatgatttgaatttgcgtttaaggaattattattagaaaaatcagttgataaaaaaccgattgatgaacttccgctttctctcaaggaaaaggtagtcttaaagaaattaataaaagctgtagaaggaaccgatcatcttttatctgaataaccattttattttttctattcttcttaatggcagctatctgctattttcttcctggcaatctcgtaaatccgttgaaccgttgttcttgcgacttgcatagatgctgcatcccaaagcttccatatattcaaatcattcctgtgaccgtattgtaataattttaatttaaaaagccgcccaggccataggcctgtgcggcttctcataagatgatttaaattaagtttatccttcaatagcaatatgctttgtggtctcaactttcttttgctccttcttcggaactgaaagtttaagaataccgtcctgatactttgccttgatatcttcctgtttcagctcatcacctacatagaaagacctgctcatagcaccggaatagcgctccttgcggatatacttgccatccttttcttccttttcttccttgtcaagtcctttagctgcgctgatagttaagtaaccattctccagcttagcctcaatctcatccttcttgaatcccggaagatctatatctacttcgtaactattgtcagtttccttgacatcagtcttcataacgttctttgcgtgtttaccataaagcaccttgtcaacatcaggaaatgaaaaatccatccaatcatcgttaaataagttttctccaaaaatactaggcatcaacataagtcatctctccttcttaaatatataaaatctgtgtcaacctgtttctttggaaccgggatgtttcaagaactcaaagcctttgctttttgttcctttcctttgttcttgactatgttatacacctattattagcactcgtcaatagttattacagcgtagcttttgtcttagttcatagagtgccgtaaagtgcctatttacaggcttttcacgggttttatgaatttatcacatttcatcaaaaatcgtcaatatacaaaaatttggtgtcaaaattggtgtcaaataaccttgatttgagattttgatgagtaacacatcagtataaaaaattgaatatttcatagactatggaacgcctaaaatgacgttccttttctatttccagccgttcttattggacggctattttattaccaaaaatgaaaggagcattaaactatgaaaaagacatggaaacgattgtgtacgggctttttagctcttgcgactgtcgttactgctttaccgactacacccgttcatgcagaaagtaagcaatactggacggagtcaaaagagcgtgtcggtatcgttgaaaaagtaatgaatgacggttcgattggttctacctttaatgagggacatttaaccgttgagggcgaggacgcttactgtattgacattaacacagactttaagaatggttacaagaccagagctgacgcaagctcacgtatgagtgccgaccagataagcgacgttgccttatctatcgaatatgtaaaacagtacacagacagccacagcggaataagtaaaaatcacgcttaccttttaagacagcttgtagtctggcagagattgagcgtacatcttggctggcaatgtgataacgtgcgagcttcttatgatgaaattccaaaggcaacgcaggacgaagttttctctggtgcaagagcctttgtcaaagagaataaaggacgctatgaatgtggcggttatatctactctggcgaggggcaggaattagggcaattctgggcgaaactgaatgtcggaaatgcgaaactgcaaaagacttccagtaatgccagcattacagacggtaacgggaattactctgtcgctggtgcaacctatggtgtctttgctgataaggactgcacaaaacagcttgccacccttacgactgatgaaaacggaaatacagatgttgcagaggtaaagtctggcacagtttatatcaaggaattatccgcaccagcaggatataaagtggataaaacaatctatccattaacaatcaaagctggcgaaacagcgaccttgaaagtatcagatacaccaaaagcaacagacactttgattgagcttttcaagattgatatggaaacacagaaagacaatccgcaagggaacgcttctctagcaggtgcggaatttacatggaagtattatgcaggcttttataacaaagacaatctccctgccgaagctactcgtacatgggttacaaagacaatcgctgaaacagacagcaatgggacaactcattacatcacaaaattagcggacgcatacaaggtatctggcgacagcttctatatgcaggacggtaaggcggttcttccacttggaacgctaaccgttgaggaaacaaaagctccaaacggctacttgttagacggtgcatatatgcaggctggcgataagtccaaacagataaaaggcttatatgtaacacagattaccgaggacggcgaccttgccgtattatctggaagtaaccagttttccgtatcagacaaggttatccgtggcggtgtgaaaattcagaaacgagatttagaaacgggcgacacgaagccacaaggaagtgcgactttgaaagatactgcttttgacatcatttccttaaatgataatgcggtattggttgagggcaagttatacaagaaaaatgaagtggtaaagacaattcgtacagatattgagggtatcgcttctacttcttctgacctcttaccttatggaaaattccgtatcgttgaaagtgaagctcccgacggttacttaactgacggtgcaaaaccgattgattttacaatcacagaaaatggaaaaatcgtggacttaaccgacgaagctcattctatctacaatcagattaagcgtggagatattgagggtgtaaaaatcggtgcaggcacacataagcgtcttgctgatgttccgtttaggatcacaagcaagacaacgggcgaaaatcatgttgtggtaactgatgataacgggcagttttccacttcttctgactgggcttcccataagcacaatactaacgcaggcaagaccagcgaggacggtgtgtggtttggaacttctgaaccagacgacagcaaaggtgcgttaccttacgatacttacatcattgaagaattacgctctgacagtaacaaaggctttgagcttatcccaccgtttgaaatcgtagtatcaagaaataatcttgtgattgatttagggactttgactgatgaatacgaaaaagaaatctctatccataccacagcaaccagcaaggacggcgataagactatccttgcaggaaaagaggttacaatcgttgatactgtcaaattggacggacttacaaaaggcacaaagtatcagttaaaaggctggcagatgttaaaggaagaaaacgccgagcttatcattgacgggaaacgtgtggaaagtgattatacgtttactgctgacagcgaaactatgaaagtggaagttgcctttacctttgacgctacttctcttgacggcaaacaacttgtaacttttgaggaattatacgatttaagcaatccagacgagccgaagaaagttaccgagcataaggatattgaggacaaaggacagacgattacctttaaggaaaaaaccaaagtcccaaaagaaccagagaaacccgaaacaccacagacaccagatacaccgcataaaacagacagtccaaaaactggcgatagcacaaacctttacggactgcttgcacttcttttgacttctggtgctggactggcaggtatcttcttctgcaaacgccgtaaaatgaagaaatcataaggcggtaacggtatgagaaaagaaaaatcacgttctccgccgataccgtgtcggcagacttccgcttattctggcttgtctgctacttacctgcaagaacacggatagtcaagggtgcgtaagcatttattttaccctttactatctgggggcttgctggtacttccttaactgccagaataagaaatcactatcaacaaacttatcaaaaatagaaagaaacgaggtaaaacaatatggaaatgaaatatgtcgtgccagatatggcacagtcttttggaactcttgaatttgcaggcgaaagtgagcctatctttgaaagagataaaaataaccgcagggtcttagccagacgaagctataacctttattctgacgtacagaaaggcgaaaatgttgtggtggaaattcccgtgcaggctggcgaaaagcatttcaagtatgaacagaaagtgaaacttgtcaatccgaagttatatggcagaggttacgcaatcggggatatgggacataccgattatgtgttgctcgctgatgatattgtagcagttgaagaaaagtaaaggagtgaagaatttatgagattatcaaacgggtttgttattgacaaagagaaaacatttggagaattaaaatttacagcggtgcgtgatgtgttcttgcagaatgaggacgggacaccgagtacccagcttaaaaagcgtatctatgatttgaagtgcagtctgcatggtggaattatccccgtgtctgtaccgccagaagtaccgttaagggaatttccgtacaatgcagttgtggagcttgtcaatccagtagccgatacggtatcacgaaagacttatacgggtgcagatgtggactggtatgtaaaggcagagaatattgtgttgaaaaataaaggcaatcagaacgcaggcagtccacagaaccatacaccgcagggacagccgaaaaaataggcttactgaatagattttcattgtagcggatatatggaactgttataatatgggtatgaagaaacggacaaataataaggtgtaaaggagaccagctatgaaagataaaaacattttaatttgtgtgggaataattatttatattgctatgtctggaattgatagatttgtttatcatatacctaatattatttatataccagttgcaattcttggtattgctttaattttaattggctttttcaaagataaatttaaacaagaaaatttcgatttatagaactgaaaattaaagatttagaaaaggtggtaaatatgatagggctaatactaggtaatataatggtggttttaggggtattcagtattatcaaaggtaaattgccccttatcaaaagatataatggggtaaaaaacataaagctacattcaagaattgagggaacagctatattattagtaggaattatgctgatttttcaatgttttatatcactaggaaatgttgaaatagttatcattattttatcaatttgtattttttcgttgatactagaaattgcattaaaagtaatataaaattcccatttgcaaaacttcatatccatacacacaaagcagttagtcttaggattgactgcttttttcgtacccagaaaggagtgattgatttatgcgtaagatttggaataaaggacaccgtatcagagccagcgacaagcaccttgtctaccacttttccatagggatgcttctggtggtattcgtggcggttcttttgctactcaatatcaaacagcttatgcgtactgattgggagcatttcagcttgttagaaaacggcttgacgctctccccttacaacttcataaccatattgatagcgacgggtgtttgtgcattggtcgcttttctatattaccgcttctgttacgacagtttcaagaagctcctgcaccgtcaaaagctggcaagaatggtactggaaaataagtggtatgaagccgataccgtacaagacagcggtttttttactgaccggcaaagcagatcaagggaaaaaatcgtctggtttccaaagatttattatcaaatggaaaagggactgcttcatatccgctgtgaaattacgctggggaaatatcaagaccagcttttacggttagaggataaattggaaagtggcttgtattgtgaactgaccgacaagaccctgcacgacggctatatcgaatataccctgctttatgatatgatagcgaaccgtattaccattgatgaagtacgggcagaaaacggcagtcttaggctgatgaaaaatcttgtctgggaatatgacgcactccctcacgctcttatcgctggtgggacgggtggcggtaaaacttattttctgctgacgctcattgaagccctactgcataccaacgctgtcctttacgtcttagacccgaaaaatgcggacttagcagacttggggacagttatgggaaatgtgtatcacaccaaagaagaaatgattgattgcgtcaatgccttttatgagggcatggtacagcgaagcgaggaaatgaagcgacacccgaactataagacgggcgaaaactacgcctatttgggactgccaccctgctttcttatctttgatgaatatgtggcattttttgaaatgctggggacaaaagaaagcgtgagcctacttagccagttaaagaaaatcgtcatgttaggacgacaagcaggttatttccttatcgttgcctgccagcgtccagacgcaaagtatttctcggacggtatcagagataacttcaatttccgtgtggggcttggtcgtatcagcgaattaggctacggtatgctgttcggttcagatgtgaaaaagcagtttttccagaagcgtatcaaggggcgtggctactgtgatgtgggaacaagcgttatcagtgagttttacacgcctttagtcccgaaaggacatgattttttgcagactatcggctctcttgcacaagcaaggcaggacgggacggcgacgtgcgaagcgaaaggcgacggcacggactagccgttgctggtgtggcgtaagccacgccagcaggtaaaacccctcggtatctaacagaggggtacgtttgcaaatagacaatagacaaaaaacataggaaacataaggcttctggcatggttttctagcaaaaatcggctgtgaagtcgccttaaaaaacttcacactttacagattgggggtatggttctgaatgaagaacaacggataaaagaattacgggagaaacggattgcttacggtatctcacaaggcaggctggcggtggcttctggtatcacaagggaatatttcaacaagatagaaagtggaaaaatgaagccgtcaaaggaacttctggaaactctgcataaggaactggcaaggttcaatccagaagtaccgcttaccatgctgtttgattatgtgaaaattcgttttcccacgctggatatacagcacatcatcaaagatatattaaaactgaatatcaattatatgctccatgaagattacggacattacagttatacggagcattattctttaggggacatctttatctatacgtcggctgacgaagaaaaaggtgtccttttagagttaaaggggcgtggttgcagacagtttgaaagttacctgctggcacagcaaagaagctggtatgacttcctcatggacgcactcgtagacgggggcgtgatgaagcgtatcgaccttgctatcaacgaccatacgggcattttggatattccagagcttgcagaaaaatgcaggaaacgggaatatattggaaagtccagaagttataagttctaccagtcgggcgagcttatcaagcacagagaggacgacagagaatatatggggcgtaccctttatcttggttcgctgaaatctgatgtgtatttctgtatctatgaaaaggactatgagcagtacgtcaagctggggacacctctggaagaagccgacattatcaaccgttttgagatacggcttcgcaatgaacgtgcctattatgcagtacgagatttgctgacttattatgacgcagagcagaccgccttttctatcatcaaccagtatgtgcggtttgttgatgaagaaccagacaagcgaaaaaatgactggaaactcaatgaccgctgggcttggtttatcggcgataacagacagagcttgaagctgacgacaaagccagagccttatactttagaccgtacattgcgttgggtacaaaggcaggtagcaccgaccttgaaaatgctgaaaaagattgataagggaaacggtacagactacatggaaacaatcgaacagcaggcaaagctcacagaaaagcatgaaatgataatcaaacagcagacgacccctgcaaaagatttagtagaaagttaggagtgataaaaatgtgggaattagtaaaagacttcctgctggtatctatgggaatgggtatcggcatagtcttgatgtgtattttgaatgtcggcaaagaagctgactgtgaaatgaaacaattaaatgaaagcgaggacaattaaatgaatttcggacaaaatttatatcaatggtttttatcaaacgcacagagcttagtgcttatggcgattgtagttatcggtatctacttagggttcaagcgtgagttttccaaacttatcggtttcttggtagttgccttgattgctgtcggcttagtattcaatgctggcggtgtgaaagatgtactgttagaactgttcaataagattatcggtgcataaaattttattgcagtgctgatatgataatgttatgatatggatatgaagaaagtgacgaattagaagttgtggaggtagtcgctcatgaaatggtataatgatatgactgaacaagaaaaacgaagttttcaaaaagtaattgttgtatgtgtagtaggtgcgattttaattctcattgttcctatggtttttcatgctattttctaagtaagagataacttccagttttacgatttcatatccacacacaaagcatttagtcttagggattgaggtgttctattatgagtgagagagaaaaaatcattcgtttatggtttgatatgtggctgaaacagcaagatttaggaatggataaaatttttacagaagatgttgtttatacggaaagctggtgtcctaaatatgaaaatctaaaaacagtaaaacattggtttaatgaatggaatacccgtggtaaagtcattatttgggatattaaacagttctttcataaagaaaatcaaactgtcgtagaatggtattttaaaaatgaaatgaatacgggaaatgttgaagaatttgacggtatttccttaattgaatggacagaagataacaaaatcaaatcattaaaagagtatggttgcaatttgaataactacaatccatatcagcacagcgataaccctcaatttagagatgaaaaaataagctggttttaaaacttaatcaaattatatctatacacacaaagcagttagtcttaggattgactgcttttttcttacctaaatttcagattggagtgatgaaatgagcgatatttttaaggatatgcaggaaaaagtcggctgtgaatacatttctgacctgccctcttacaagcgtaaggtgtggcaggaaatgaaacggctgaaccctgccgactatgaagaaagacagttagaagatttttctaactatgtgtttggtatgtcgtaccagaccttaaaagatgtgatgaaacaacagaaaggacgtgaggaacaatgcaggaaacaagggtgctggtggaaacgaaaggaacaactggcgaagaaacaatatcatactggttcgacctgccgatagatgttgccgaatttgaagaaaaattaggtatcggtgcagaaagtggggattaccgtatcatcgaaaaggtgttgccttatgctgatgaagtccacgagcatacaagcgtgtatcagctcaacgaattagattttatgtaccgccagctttcaagcgatatgcaggaagaatatgtatcactacttacggtgtttgagaatttagaagcactttatatttgcaggaacgtgattacggtttatcccgactgcaaaagcatgatagatgttgcaaggcaaaagctgatgaacgacccgacgttcaaacatttatccgaggactgtcaagaatactacttcgactttgaagcctatgcttctcacttgcaggaacacgggaaatttttagtaacagaacacggtatctttgaactgccagagtaggaaatgaggttgtgcttatgattgatgatatggcggtttacattgctaatcttggcaaatataatgagggctatttagtcggtgcttggttcacgtttcccattgacgaggaagatgtgaaagaaaaaattggcttgaatgaacagtacgaggaatacgctatccatgatactgacaacttcccgattgcgattggcgagtatgtttccattgaagaactcaatgagatgtatgaaatgatagaggaacttcccgactatatcgtagagtgtctggacgaatttatcagccactttgggacgctggaagaagtcgtggaacacaaggacgatatttattattatcccgactgtgaaaccatgacagacgttgcctactactacatagacgaattgcaggcacttggggatattccacccagcttgcagaactacattgactatgaagcctacgggcgagatttggatatgggcggttgcttcattgaaacaagccgaggtatgtgtgagataccatattaacgctggaagatcagcgacaagcattgttgctactgacagcgtatttctcttttaagggacagtctgaaaatggctgtccttttctattttgaaaggagctgaaagaacttgaaaaagattaaaagctacacgggtatctggaacgtggaaaaagtcttgtatgcaatcaatgactttaacttaccctttcccgttacctttacacagattacatggtttgtgattacagaatttatcatcattctatttggggatattcccccactttccatgattgagggagcatttctcaaatactttggtattcccgttgctctcacttggtttatgtcgcagaaaacctttgacggaaagaagccgtacagctttttgaaatcacagataacctatgccctgcgacctaaaatcacttatgcaggaaaagccgtaaaactgcataagcagaccttgaatgaaacaatcacggcagtaaggagtgtgaactatgttcccgataaaatatattgacaacaaccttgtctggaacaaggacaatgaggtgttcgcctactatgagctgataccgtacaactattctttcttatccgcagagcagaaatttatcgtgcatgatagtttccgacagcttatcgcacagtcccgtgagggtaaaattcatgcgttacagatagcgacggaaagctcaattagaagtatgcaggagcagtcaaagaaactggtaacgggaaaattaaaggaagttgcctatcagaagatagacgaacagaccgaagcgttagtatcaatgattggggacaatcaagtggactaccgcttttttcttggctttaagctcatggttacggaagaacagctcaatctgaagaacatcaaaaaatcggcgtggctgacgtttgcggaatttctccatgaagtgaaccatacgctgatgaatgattttgtttccatgccgaatgatgaaatcaaccgttacatgaaaatggaaaagttactggaaaataaaatctcccgtcgtttcaaggtgcgtcgcttggaaatcaatgattttggctatctcatggaacatctttatggcagggacggtatcgcctatgaagattatgagtaccagctaccaaagaagaacttgcagaaagaaacgctgataaaatactacgaccttatccgtccgacaaggtgtgtgattgaagaaaaccagcgatatttacgcttggaacatgaggacaaggaaagctatgtgtcctactttaccgtcaatgcgattgtgggggagcttgattttccgtcctctgaaatcttctatttccagcaacagcaatttactttccccgttgatacttctatgaatgtagaaatcgtggaaaatcgaaaagcattaacaaccgttcgcaacaagaaaaaggaattgaaagaccttgacaatcatgcttatcaagctggaagtgaaaccagctcaaatgtggtggacgctttagatagcgtggacgagctggaaacagacttagaccagagcaaagaaagtatgtataagttaagctacgtgatacgggtgtctgcacccgatcttgacgagctgaaacgccgttgtgatgaagtcaaggacttttacgacgacctcaatgtaaagctggtgcgtcctgctggggatatgctggggcttcattctgaatttcttcctgccagcaagcgatatatcaatgactatgtgcagtatgtaaaatcagacttcttggcagggcttggtttcggtgcgacacagcagttaggggaaactacgggtatctatatgggctattccgttgatacgggaagaaatgtgtacctgcaaccgtctttagcttcgcagggagtgaaaggaacggttacaaatgcccttgcttctgcttttgtcggttcacttggcggtgggaagtcattctgtaataacctgcttgtgtattattctgttttgtttggcggtcaagcggttatcttagacccaaaatcagagcgtggcaactggaaagaaacactcccagaaatcgcccatgaaatcaatatcgtaaatcttaccagcgacaaggacaatgcaggacttcttgacccgtttgtgattatgaagaatgtcaaagacgctgaaagtctggcaatcgacatcttgacatttttaacgggtatttcctctagggacggcgaaaaattccccgtgttacgaaaagcggtgcgagctgttacccagagtgaaaaaagagggctgttacacgttattgaggaattgagaaaagaagatactgctatctcacgcaatatcgcagaccatatcgacagcttcacggactacgactttgcacacctgctgttttcagacggtacggtggaaaatgctatcagtctggataaccagctcaatattattcaagtagccgaccttgtattgccagataaggacacgacctttgaggaatacacaactattgaattattgtcggtgtctatgctgattgtgattagtacctttgcccttgattttatccattcggacagaagtatttttaagattgtagaccttgacgaagcgtgggcgttcttaaatgtggcacaaggagaaacgctctctaacaagctggttcgtgctggacgagctatgcaggcaggcgtatatttcgttacacaatcttctggggacgtggcaaaagaaagtctgaaaaacaatatcggcttgaagtttgcctttagaagcaccgacatcaacgagataaaacagaccttagaatttttcggcattgacaaggacgacgagaacaaccagaaacgcttgcgtgatttggagaacggacaatgcttattgcaggacttatacgggcgtgtcggtgtggtgcagatacaccccgtctttgaagaactgctacacgcctttgataccagaccgcccgtacagagaaatgaggtggagtgatgaaagaaaggataaaaggtgcgttcacaaaaaagaagattttccactttctcaaaatggctctgttcgtggtggcactctcccttatcctgctttcacttctggggacggtggctcatgcgacggggcttgtggacgataccataaacgcagaaaatctttactcaaaatatcccctttccaactaccagcttgatttttatgtggataatagctggtcgtggttgccgtggaactggctggacggtatcggaaaatcggtacagtacgggctttactgcattaccaactttgtctggacgataagcctttatttaagcaatgcaacgggctatgtggtgcaggaagcctataaactggacttcatcaacgatatggcagacagtatcggaaagagcatacagacccttgcaggtgttacggcaaacggtttttccagctctggcttctatgttggtttcctgcttctcattatcttagtggtgggactttatgttgcctatacgggacttatcaaacgggaaaccagcaaggcacttcacgccgttatcaactttgtagtggtgttcgtactgtccgcttcgtttattgcttacgctcccgattacattaaaaagataaatgagttttcatcagacatcagtaccgcttcacttgacttgggaacaaaaatcatgctcccaaactctgacagcgagggtaaggacagcgtggacttgatacgggacagcttattttccattcaagtggaacagccgtggctactcttacaattcgggaacagcaatgcagaggaaatcgggacagaccgtgtagaagctctcgtatctgcaagcccagaggacgaggacggcaagaccagagaggaagtcgtgaaaacagaaatcgaggataacgacaacaacaatctgacgataccgcaggtcgtaaaccgtttaggtatggtgtttttccttttgttctttaacttaggtatcacgatatttgtattcttgcttacgggcatgatgttgtttagccagatactttttattatctttgcaatgtttttacctatcagctttctactctccatgataccgagctatgaaagtatggcaaagcaggcaatcgtaagggtgtttaataccataatgacacgggcagggataacgctcattgtaacggtggcgttcagcatttccagtatgttttataacatttccacggactatccgttcttcatggtggcgttcttgcagatagtatgttttgctggtatctatatgaagctgggcgatttaatgagtatgttctctttgaacgctaatgatagtcaaagcatgggacgaagaattttccgcagaccgtatctgtttatgcgacatagggctaggcgtatggaacaccatattgcaagagctgtaagtgctggcggtatttcgggcggtgttgctggtgcggtggctggaagtgccgttgctggcaagagggctgaaagaaaaaatacagcttctaaagaaaatcggggcaatatcacttccagcatgggacagcgtgcaggctcaaaggtgggtgctgtcttagatacaaaaaataaagtgaaagataaggcaaacgctgtcaaagaaaacatcaaagatatgccgacacagaccgcttatgcggtatattccgcaaaggaaaaggcaaagtccagcgtatcagatttcaagcgtggcatggtgcaggaacagcagtccagacagacgggacgattggaaaagcaggaacagcgtaagaagaatatcgctgacaagcgtatggagcttcaaaaggcacaagaagcaaggcaggcacagcgagaggttgacggatcagcgacaacgggagctacccgtccccatgagcgaccagccacagcttcaaagccgagtgcggaaaaaatgcaggaagtcaaacgtcctgccacagcgaccacttcaaaagcaagtgagccagtcaagacaactgttatcaaagagcgtccgttatcttctggtgcttctgataggaaatcgccccagcctgcacagccagtacataggcaaaatgtagaaaaagtggtatcgcaggaaacacgccagaattacaccaaagaccgcagggtaaaggttcagcagacccagaacgtccagaagaaccagcagaccatagagaaaacccgtaaccttgtaacgaagaaaggacagaagaaaaaatgaaactgaaacatatcgctatcattggcagtctgtttcctatcctcttttctctggtgcttttctttggggtgttgattagtgcggacagcgacgacgagaacagcaacttttcttctggcattacgggtatgaatttatccgcagaagtcttgaaacatcagcctatggtagaaaagtacgccagagaatacggtatctccgagtatgtcaatgtgctattggctatcattcaagtagaaagtggcggtacggcagaagatgttatgcagagttcggaaagtcttggtttaccgcccaactctttagatacagaaagttcaatcaagcaggggtgtaagtattttgcgtccctgctttcttcctgcaaaaatcaaggtatcgacgacttgaatgtagcgatacagtcctataactatggcggtggctatgtgggatatgtggcaggaaaaggaaagaaacacacctttaaccttgcagagagcttcgcccgtgagaaatcgggtggaaagaaagtaacctataccaacccgatagccgttgcgaagaatgggggctggcggtatggctatggaaatatgttctatgtggaattagtcaatcaatatttgactgtggcacactttgataatgcgacggtacaagcgattatgaatgaagcgttgaaatatcaaggctggaaatatgtgtatggtggcagtaacccgaacacttcctttgattgtagcggacttgtgcaatggtgttatggaaaagctggtatctccttaccgagaacagcacaagcacaatatgacgctacccaacatcttccactctcgcaggcaaaggctggggacttggtatttttccattccacttataacgctggaagttatgtaacacacgtcggtattcttgtttcgccgacacagatgtatcatgcaggcgaccgtgtgagacgttcctaactgaaaaggttaggcatttatgaaagcacgttaaacaatttcataaagagaactgataatctgaaaagtcgaatgacggagtaacgccctgaaaggctttagctaagactgcgacgtgcgattaagtagataaggacttgattgtgcgaagctcgcagaagtcggctgagagtacaccctaaagacattaaggcggtacaggaaatgcgaaccagaggtggtcgagtgtatgataggtcgggtttccataaaatactcatggtaagtatgtatttcagaaagtgaaatactgacaaaattctgaatgtacgtgtctaaactgcgagattgactaacagcaatcgcctctattgaggagcttgtggggattagtaaaactggttactatgaaagtccttatactgtcaagggcagtatcaagcaagcaggcacagaggaattacctaaaagtatatatgtaaggataagattatcggaacgtcgtaagctgaaaacatggatacccttatcggtaaatgaagtgttcacaaggaaaatttctaaagaaatataacttgggttaatttcagtgaaagtggtggcacagtacctatgaagcgatgataataaatcgtggagggatagccactagtcaatggcagttaaaatcaattcattaaaaacaattaggttcgagtacgactaaaataggcagttactccaaaggaggtacaacgccgactaatgacaaccaaaacacagaagaaaaaggctttaaggttcaatgaatactacgatacacaagacattcaagacaaattgtatcaactgggaaaagaaaactataagtttattaaccttgttgaactaataacagataaacgaaatgtaatgcttgcatatcgaacaatcaaaacaaacaaaggaagcaaaacggctggcacgaatagtaataccattacagaattagctgaaaccagtccagagttactgacagagtatgtaaaaataaggcttaaaaattatattccccatgcggtcaaacgagtagaaattccaaaaccaaatggaaaaacacgaccactcggaataccaaccattgaggatagactagtacagcaatgtataagacaaatattagagccaatattagaagctaaattctatgaacactcatacggatttcgcccagataaaagtacatctcatgctgttgctcgcttctatcatcttgcacatagtggatttcattatgttgtggatatagatataaaaggatttttcgataatgttaatcatgggaaactgttaaagcaattatggacgttaggcattagagataaaaacttgatttccataatatcaagaatgttaaaagcaccagtcaaaaacaatggagttcccaacaaaggtactccgcaaggtggaatattatcccctctactggcaaatgtagtattaaatgaacttgactggtggatagcaagccaatgggacaaccaccctacaaactatccatacaaacatcaaagaagcaagttacttgcgttaaaggaaacacagctaaaggaaattaaaattgttcgttacgctgatgatttcaaaatcatgtgtaaagattgtgatacagcacagaaaatcttcatggctaccaaaaagtggctaaatgaacgactacatttagaaattagtccagaaaaatcaaaaatcacgaatattcgtaagaattattcagaatttctaggattaaagctaaaggttaaaaaaggtaaagctggaaaatacacaaacagaagccacatgagggacaaggctaagaaacttgcagtagaaaaacttaaaaagcaaatcaaatcaattcagaaaaacccaactagagaagctgtaaataagtacaattctacggtgttaggattacagaactattacagtatgtcaactatggtaaattatgatttcgtagagattgcctatatagtcaacaagagcctgctttgtcgaaccaaacacattcgcagtaagaatggaactataacgcaaacatatcaaaagttttataaggaatatggatataaaaagatattcatagcaggtactgccctgtttcctattgcaggaattaaattcagagagccaaaaatgatttcaaaagagtgtaccagatatacggttgagggaagaaatgcaatacataaaagattacaaatgaacatgagaattattcattatctcatggagcagacatcgcccctacaaggaacaactgaatttaatgataatcgaatttctgtatatgttgcacaaagaggaaaatgcaagattacaggaaaagaattaaaaatcggaaatatggacttgcaccatataaaacctaaattcaaaggtggttcagacgagtataaaaacttgatatatgtaacaaatgaaatacatattcttatacattcctcggctgaggaaaccacggaaaaatatttgaaaatagtaaaaccagacaaagcacaactaaataaaatcaatcagtatagagttatggttggaaataatgagttagatcaaaacgactaccattgagggaacgccgtgtgataggaaactatcatgcacggtgtgaagtgggggaaaacttggagataaaatcaaaaagttacctatcactatcgataggatatgcagacctaagtagtagttactggcaacagcacttaatcggtgcaggacgagtaaaacaatagaaaggacttgaaaatatgtttaagaagaataagaaacaaacagaaactatcaaagaaccaaaagaaaaaaaggtgcgtactgttaaggtaggcacacataagaaaaccgtgattgcgttgtgggtggtgcttatcgcaagcgtgagctttggagtgcataagaattttactgctatcgaccagcacaccacccatgaaaaagaaatcattgagcttcgcttgcaggacaccaacgggattgaaaatttcgtgaagaactttgcgaagtcctactacacatggaataacagcaaagaagcgattgaagcaaggacgcaggcaatcagcggttatctgacaaaggaattgcaggacttgaatgttgatacaatcaaaacggatataccaaccagctccacggttacagatgtgattgtatggcatatcgagcagtcgggaacggacactttttctgctacctacgaagtagatcagcagataaaagagggagaacagacaagcaatgtgaaagcaacctatactgtaaaagtccatgtggacgctgacggggatatggtaatcgttcagaaccctacccttgcaccagcaatcgaaaaatcagactatgagcctaagacaccagaagcagacgcaagcgtggacgctgatacggtaaatgacgctaccgcttttctggaaacattctttaagctgtacccaacagcgacggaaaaagagcttgcttactatgtattgggaaatgtgattgaacctatcggcagggactacctttattctgaactggtaaaccctatctttataaaggacggcgacaatgtgaaagtcaaggttgcggtaaaattcattgataatcagacaaagtctacgcaggtatcgcagtatgagcttgtgctacataaggatagtaactggaagattgtaggataaatgatatagcgtgcatttcttatcagatttgcacgcttttacaaaacgacaagaaaactgtgcaaaaatattgacttgtaatgaccgaatgctataatataaatgacaagtgtacttggtattatttgaaaggagcgttatataatggataaagaaaaaatactatcacaaaacaaaaaagagaatctatatcttgatgaatacgaaaaacatattaaacttcaagggaaatcttttggcttaatgtttgttttatttatctgcattttaattcttctcattaaagcagtttgtaaagaaccctactatgacataatgacaattattgggtctgtggcattgggctctatgggttatgaagcacatatttcaaaaaataaatccaaatttgttattgctttattctttcttctatttatggggtattacttttataaatttttaatgataggtttatagaatggacgaacatttaattttgcgaaacagattaaaaactgtacgaaaagaaaaaaaattatcacaaacagaattagctgaactagtcggggtttctcggaatacaattagttctattgaaactggacaattcaatccaacagcaaaattggcattagtgctttgtatagctttagataaaaaatttgaagaattattttattttgattaaaggagagaacgattatggaattagaggaattgattgttgaaatagttataggattgtttttactttttatatcttatcaaataggaataaaagagaatattactttattacatggttatcattatacacaacttgaccctaaagataaaaaggtgtttacaaaaaaaataggaataggcactttactggttagtattggtattcttgttatgccgattatcaatttaatctctcattctgaattaggctattacataggtcttattttgattgttgtaggagtgttttatatcatattcatcattgtaaaatacaatggaaaacttattagctttaaaaagtagaattgaggtatgaatatgataggactgaacaaaagagatataaaaaaggcattgaaagctggtgcaaaagctggcggtgtatcattggctgatgttcgggcggatattgaagctacgattgatgaagctatgaatagcaccgacccagaggtgcaggcaaatttcaaaaagtattttgggaataaacgccctacaccagaagaatatatttatatcattacgaaaaagacaaaggcaaaattataataaaagggtcgtggaaatgcttcacaaaattgtgatctgcattatcacggctcttttactctctgtttactttcaaaactgtaagtgtaattgaatactgcccttgctataatttaattgtattccaaaacaaataaatgtggcaggaagaaaggagcgatttttaatggaacacattttaaatttagagcaagtaaaaaaatactacgggggtaactctggaaatatcacaaaggcagtagacggtatttctatgtatgtagataagggcgaatttgtcgcaatcatgggagctagtggttctggaaagactaccctattaaactgtatctctacgattgatactgtaaccagcggacacattacagtcaataatcaagatattaccaaaatcaaggataaagattttgctgatttcagacgtgaaaatttagggttcatttttcaagatttcaaccttttagatactttaacgattggagaaaacatttctttatcattggttatcaacaaacagaaccctactgatattgagaaaagagttcatgctatcgccgataaattgggtattcgtgatattttatcgaaatttccttatgaagtttctggcggacaaaaacagcgttgtgcttgtgctagagccttaatcaatgaaccgaaactgattttagctgatgaaccgacgggagctttggactcaaaagcttccagattattactggaaacaatgtctgaaatcaacaagaaaatgcaggctactattttaatggtaacacatgacccgtttagtgcgtctttctgtgaacgtattttgttcttgaaagacggtaaaatattcaatgaaattttcagaggggaaaaaagcagaaaagatttcttcaatgaaatactggatatattaaccttgctcggaggtgaagtgggaaatgttaggtaagttagcgtatagaaatacaaaaagaaatattaaagattatttgatttatctgataaccgttactgcatccttttctcttatatttgcttttaatttggtggcaaattctgatgaaattgtaaagttatgttccagtatggatgcatttaagaattcattgttcgctgtaaatattcttattatttttgtgatatgctttttgatcaactatacaacgaaatttatgtttgaaaaaagaagtaaagaattaggaacatatatgcttcttggcattaagaaaaaagaaattgcccacttagttgtaattgaaaacatactgttgggaattttagcaattgtattagctattcctattggctttttattcagccagtttgtgtcgttagtaattgtaaacttactgggtattccaaaaactctctttatttctttgaattttgtttctattggactattgataatttattttttaactatttatgttttggttttacttaatctattaagaagaataagtaaaatgacgatacgtgattttctttactttgataaacaaaatgaaaagaaaatgttccgtgacagtaaaaaaagaaatgtcatttttgttttaagtattattcttggtgtgatttctctttttctctggaattcacgttgtactatggataattttaataagcaagaaacactcacctgtttgatggtaagcgtaatcatgttgattatcagcatttatggtatatctacaacttgtgcagatatgttcttgactgttttgttaaagaataaaaaaatgaaatatcaaaatgacaatctgtttgtagcaagaacatttgcttctaaagcaagaacaatgagcttcacatttggtacattgtctatgttgattttaacttcactgctggctctgaattattctagtatcaacaaagcttcgtatgatatcagcgtgaatttaaatgcaccatatgatatacaactctttgatgataagcaggtatttgatgaatatattcgagtaattgaagaagaatatacgattgataataccattgagtacgacatttataaagagccgaatcatcaggtacaaaaattcttccaatcagaatattatgattttgacccagtcttgaagttaagtgattataataggttactagaattaagaaagatgccgttgctttctttaaatgataacgaatactatatagttacaaatagcaagtttgcatatgaggttgaagataacaaagacattgaaaccataacagtagcaaataaaaatttgaaattaaaaggatatgacactaagtcttattggaactctataactaatactggcagatttgttgttgtacttccagataaatatgttcaaggacttgaagtatcagaaaatcatttgattatagatacaaaagaagatacagacgcagaattagaaaataagataaaagaagatatgcaacatcaattagtaaaggttgatgaaaatggagaaataaatgatgagtcgtatagagtaaacgtaagaggtgcagaaatagaacaacaaaaagcaatggttgcaatagtagtcagtctgtttatgtacattgcatttattttgatttccgcagtaggaacaattttggcagttcaatcattgagcgactctactaaatacaaatatcgctacctgaccttgcgaagattaggaataaatgataagtcgctatttaagacaatcagaaaacaattattgatattattttgtgtccctgcaatatcagcaatattgtgttcttttgtgatgatgtcgtcattgaataatgtgtatcaacaaattttgggagataaacacctttatctaatgtactttggcttgaatttaattatcttcttcctaatttatagtatttactggatagcgacgtatatcggtttcaaacgaaatatcaatgaggagagttagatttttctagctctcctgctgtggaattattataatggtaaatcaagggggtgttgaaatgagaatagcgattatcgaagatgatgaaatcactcgtttggagctttctaaactattgaacacacaaggatatgaaacagttttattgactgactttggaaatctgacagaggaattaaagcaatattccatagaactggttctgcttgatattaacctgccgtatgagaatggctacgaagtatgcaggaaaataaaacaagtcatgccagtaccgattatctttgtaacaagcagagatacaaatgctgacgaattgaaaagtattcaagtgggcggaattgacttcatcacaaagccgtatgacacgcttattcttcttgagaagatcaagcgtgcattgcagttgtcaaacccgagtaatttccgtgagcttgtcaaaaaagattgtacccttgatttacatttatccattttgaagtatcaagagcaaagcattgaactgacaagaaatgaatttcgtattttgtactacttctttatgaacgaagataaagttattagcaaagaagaactattggaaaagctgtggaatgacaaatattatatagacgaaaatgtattattggttaatatgacccgtctaaaaaagaaaatgaaagaaatcggtattgttcatttattggaaaatatacgaggaaagggttggaaactgtgagtttttttacattcttagaagaaaaaataacagagatattgtttcagcttttctttcttgccgtagtagcatttctcttgattttctacggtgtagatacgctgtttgttgtatcgctggtaattctgttcatcagcatacaagggctttttcaatggtgtttgtatcggaagaaacgtaacgcttcacaacatattattgatttagtagacggactggaagaaacctattatattgcagacgttttaccaaagccaaaagaatttcaaaataaagcctattgctacgcactaaaaaaagcctgcaaatctatgaatgatgaaatcggcaaaatcacagaggaaaagcaggactatcaagaatatgtggaaagtttcgtccatgaaattaaaataccgataggagcattgtctttgacgtttgacaatacaaaaaattacacattaaaaaaagaaacagacaaaatatttcagttagtggaacaaatgctctactatgcaagaagcgaaaatacggaaaaggactattttgtaaaacagttgcagttagacgaagtgatacataatgtcattctgaaattccgtcattcgcttatggaaagaaaagcaattatcaatatccatgacatagaaaatgtcatttatactgatgaaaaatggctgacattcattctatctcaaatcgtgcaaaatgcgattaagtattttgataagcaagaaaataagctgacgatatacagtcaagacaatggtacaaatatattacttgtggttgaagataatggttgtggaataaaagcgtctgatttatcccgtgtatttgaaaaaggttttacgggttcaaatagaaacaaggcaaatgcaacgggtatgggactgtatctatcgaaaaaattatgcgataggttgggcttgaaattggatattgcttctacggaaaaagaatatacaagactgaccattacatttccaaaaggaacagttcataatttttcagagtaatttgaaaaccatgccaacattgatacggtgctttaagggggcttgcattatggaaagctttaagtacaattctttgcaatcaaattccacctaatagcacactattaaaaattgaatatgttttagctttaaaggctcgtacagactatatgttttgtgcgggcttttttcatacccgaaaaaaatttaaaaatttttcaaaagaggtcattaaatcacacctttcattccctatatggtgcggaaagagggataaacacttttcaaatcatagtggaaagggggtgagattgatgaaaccgtctgacttccagaaaacagttcaatgtcgctttgaaagttgtttgaagaaagttgtccgtcatattgtaaaggactaccaacaaggattgaaacgacgaaaagataaagaaattccattctgtgaacttccagaaattttcgttgaaaattttgctgtgtgggatgactacgaaacagattatacaatcttttcagtatgtggcattgatattcgtgtccttgatgatgagctggcagaagccttgaaaaaacttccagaaagaaagagaaatactctgttaatgtattacttcttggaaatgacagaaagtgaaattgccaacttacaaaagattacgcaaagcggtgtatttagaaaccgacatcatgctttggaaactatgaaaaaaatactaaaggagaagcagtaaaatgaagcaaacatttaagaagccgtcctactatttgctttcgcaagcaatggacggggacgaaaaagcgattgaaaaaatactggcattttatgacccgtacatatcaaagtgctgtttgcgcccactctatgatgaatacggcaatgtctatattgttgtagatatggagttaaagggacttatccgagaagcacttatcaaaatgattttagggtttgatattgccttagaaatcgaagaagaataagcagtttttagcagagcatggtttaatgttcccctctttcctgctctgccctgcttttacatgaaagcaacacgctttcgccacagctctttgacaactgaataaagcagacagatacgtttgtgagatagcgagccacggggactgtacgccacgacctttccaaaagaaagcgagcgactcacgcagtgatccgagagcgactgttggaaaagtcgttttgccatgacctatcctcacagaataatgatacgtccgcatggtgcggttctgcccacaagaatgggaatagttgagatactaatggagctttccaaagccgtctgtctgcttatgtaacttataaatagacacacagtaaagggggtgttacattatgttaaatactgatgtgttaaatgatgtgatgttccagcgaggtaaggtgttggaatatgaataaaacgaagataagagcaacggaacagccgattgctgttgatatagagggactgtctgctaggttatcttgtggtcgtgctactgcaagaaagattggcgagcaggcaggagcaaaaattgtgataggtcgcagggttctttattccatagaaaaagtcaagaaatacttgttatatttggaagaatagagcgattttctatttatgttctctggcgtgtgtagtataataagaaaggacaaagcacgctgtgagaacaagaaaagaggctttttcagaaaggaatggttctcatggcaattagtagaaaagacccaaaaggaagaaaattaagagagggcgaaaactggcgtaatgatggaagatacagttatcgttatacagatgtaagaacaggcaagagattgacagtctatgcacaagatttaccagagcttcgagaaaaagagaagcagattgcaaaagatatggaagataatatattgacagacggagcaatcaaaaaaatgacgcttaacacgttgtttgagcgttatatggcaactcgtgagctggctgatactacaagagttagttatgttcgtgcttgggaaaacagagtaaaagacgagattggaaatattaaagttgttcagcttttaccctcacatattaaagcgtattatgcgaaactttccaaagctggatatgcttattctacaatcaagtatattcacaacctgctttatcctgcattagaaatggctgttgatgatgatattatccgaaagaaccctgcaaaaagttccattagtgattatggaaaaccagcagaggaaaaagaagccttaacagtttctcaacaagaaaagtttatggagtttgtaaaacagagcaatgtctataacacatattatcctatgtttaccataatgattggtacggggttaagatgtggggagcttattggtcttacatggaaagatataaacatcaaggcaaaaacggttaatgtagaccaccagctcatttataagaatttaggcgacggttgcaagttccatatctcaacaccaaaaacgtcgtcgggtattcgtattatacctatgacacaagaagttgcaaaagcctttgaggaacaaagaaaaatcaattttatgcttgcaaaggataagagcattgaggtggacgggtgttcggggtttgtctttacagcaaaatcgggcagaccgcttatgccgaatggcgtaaatagtgttttatacaacattgtagacgcatataacaaaaccgaagtagagagagcaaaaaaagagcataggaaagcagagctgttaccaaagttttcagctcatgtaatgcgtcacacagcttgtaccagaatggcagagtgccgtatggacgtaaaagttcttcaatatattatgggacacgctcatatagatgtaacaatggaagtgtataaccatattggagagctgacaaggattgaaaatgagattgcaagactagatagtatggtgttaaatgcttgacaccacaaaaagagaaattggtgtcaaattggtgtcaaaacagaaaaaatcacaatttcaaaagaaataagatactgcaaaccattgattttaaagggtttgcaaaaaaaatctcaaaaaattagcactcacctcttgtgagtgctaataatttataaaatgtttatattttccaagcagcttcaaagcacttactatatggaactccattattttgcaataaataacactccgagtgtgccaggcccacaatgtgatgaaatcacaccacctgctcttgtctctataatttccttaaaaatgccaagagaggctatgtaatcccttacctctatatttcctgcttgcatccattttaccatcctttacaacgatcatgggatgaagcgccaatgctcctcctataagcgcagaaacagcattgcatctgccacctctgtaaaggtacacaagtgtatctacaacaaagcttgctcttaccttcgggatcaattcatcaattccggcttttatctcctcacgggatttaccatccgctgccataactgccgcctcaacaacaagcaggcctattcctgtggacagatttcttgaatctatcaccgtaactttatcttccgcatcaagttcttctgccgccattctgatcacattgattgatgtcgacatctcacttgatatggaaaagcatatgatctccctgccttcatcaatatatggtcgcattacattcattgctgtttctatagatggagctgaagtctttggtgtagtcttatttttatcagcccactcatacaatgcatgaatgtctatctgcggtccatcctccagttcttcatctcattttacaatatgaagcggaataatatctatatcgtatctttctaaaacttcctgtgacagatcacatgtactgtctgatataatttttatcatctttaatacctcgttttctgttgaatccttcatctaagagaactgcgccaatctgtattatttcactggcgtatttatatatttttcttaatgacagctatggcttccgcatccatgctcacccacggtcaaaacaataggtgtgcttttctcttttttccattctatcacaatctcaccattaatcatcaattttttgatatttttctttccaccactgtaaagcagcctctgaacatttcgttatacagagggatacaaataagagcaagatccaccatctacacccacaacttcaacatattcaatatggtgttttttcacagttctatacctccataaaatttactttatcctgactatcagaccactgttcttttgtaagataagtaaaatgctccgttctaacatctcccataagtgcacagggtttattttcttccgtatgatgatatttgaatccacatttttcctgacagcgttttgatttttcatttccgtcataatatccacaccatatagcactacaacccaaatctaaaaaagcatgcttctgtaaagctcgaaccgcttcgggaatcaagccctgcccccagtatggaacacctatccaatatccaatttctatttcatcatcagctgcttttgtgtgcgactgagctggcggagtcaatccgatacttccaattgcaacattatcttctcttaaacacactgcatatgtttcatctgctgccaaaacacttttgatgatttctctgctattctctacacttgtatgtactggccatcctgctataggcccaacctctggattttttgcatatttatataaactctctgcatcatcctctttccagggacgaagtattaatctctcagtttctaatgtcataacctactcctttaccaactgctttctaatataatttgtgatcgaatcaaatacgaccggggacattttaacaatccggctccacattcgaattccttgataaactttttttcatgtaaagcacctcctcgttaaacttgaagttgttgatttctttattatctaatctgttagtaatctatccaacagcatctgcctattatttataaacatttctgttacctggtaactctctgtatcctcatattcgcacagatgtatgcatccattatcaaaacaatagatatctgcatctggtattcctaacaaaatcggcgaatgcgtaactataataaactgtgctccctcttttgcacatctgtatatttgcattaacaatgtaagctgtctctgtggtgataatgcagcttccggctcgtcaaaaagatacaagccatttggattcatattattctgcgctaatgcgagaaaactctctccatgtgatttttcatgatatttagcggaaggatgtgtaatatctgcatattcttcttcctgtgttgcaacattataaaagctttctgccctaagaaaatatccccacttttccttccgatagcctttggcaattcttatcgcatcacacaactctgaatgtgtatcatgcgtagaaaaaacataattctttgttcctccctcaggattaaaaccatgtgctacggcaagtgcttccaacaaagttgatttaccactgccattttctccaacaaaaaatgtgattggtttattgaaatcaagtttttcaattcccttaaaagcctcgattccctttaaataactatcgttatcaattctattccaatcgaatattactctttgtatgaattgattattcatttaattcggcctcaatttcttcaatagtaggcatactacctctgaactcttctggtataagttttgataactcataactagaaataccaagtggctggctagtagattctaatgcatattgggcttctactttatccatatctttacaaatcagaagtcccaaagtaggattatcagcttctgttttcatctgatgattaacagccacaacataagttcccaattgacctgcataagaagaatcaaattttcctgtctttatttctacaacaacataacaatgcctttgagtattgtaaaataacatgtctataaatttttcagtatctcctacctcaattctcacttccctgcccatataagcaaagccagtacctaactccataagaaaattattaactttctctataagtgcatcctttagttccttttcatcatacctttcacgcaaagtcaaaaaatcaaaattatatggatccttcgtaattgcttgtgctaaatcgctctgttctatcggaagtgtgttagtaaagttagttattgctttgccttgacgttcatataaatccgttcctaagaagtttagtaaaacatctcttgaccaattgttttcaatagtctttctgatataaaacaatgcctttgcagaattccctttgcatttatcaagtattattttgttatgtccccatggaattctaaaaatgatttgtaaattatccccaacttggggacgatttgcatctgtaatcaattcgtcctcaacctgaggacaaatcactgcgtcaggatacatctcataaaaatatctcatatatttcaaattagttggagaaaatgatttcacatctggcaaaatggatttcaaatcgtcactcaccgttttatagaatcccgttccatacccgaactgttcgctcatagatgaaatgcccttaccaagtttccaataaaatctcagcatctcatcatttatcttcatagaagccctgatttggctttttctaaaatcagtggatattccggcaatccactctttatattcattatcagccttaatcaattcgctcatatacaatcctttctaatgtgtcagttagaaaaattccgattctaatgtctctattataccataatgatactattataaaaaaggaaaaagagttcattcgagctcttttgagtcagttctgcaaacttgaatttatataattatctctctaactttccccattttataggctttcccgcctgtccattagtgaaatgatatgtagtttcccttatttttacccttatgagataatcacaagggaaataagggaatttttttaatcattgcctaccactttatcaagaagcctaactgattttcgtttagcatctcttgtggcgtgagcatagacattcattgtggtactgacatctgagtgtcctaacagttcctgcacatcttttggggcagctccatttgctaaaaggttgcttgtataggtgtgacgtaactggtggaaatgaaagccttcaaatccctctaatgtttttgccacctttctacaaacagtccccaaagtagttggaagttccagacaaccatccggtcttaaacagacgaaagaaatttctttataatctgccgggacttcctctgttctgtctaagcaataatattcgtagtacactctgtttttctctttgaccgctttgtagtagttcgtgtgataaagttctccgtactgcattcgattttttaactgctctttccgggcattacggaaaatctctaccagcgtatctccaaaatcaacaatcctcacttttttccgcttggttggtccgatgatatatttgcgctttgagccatcgtatcgtatgctacgtcttatggtaaggcattgttcttccagatttacgtcctgccacgccaaaccgcaggcttctccaatacgaagcccggcataataggctatctggattggaagtattgcggctgggttcttttttttcagataagcaagcaatctttcataatcttctcgtgaaattggttggatatttccgtccatgtcctcgtctgaaaacaaatcaacttcatccgtctgataccgcagtttaatatactgcatgggattaaacgtaatatactgttttggaaatactgcaaagcggaaggactgctgcatgactgcggaaaaagaatggatgtaatctttgctgtaaccctttctctcttttccgtcgggatgaactcccccgaaggaaagcaaatcaaaaaaggattgcaaatgctcagaggttacattttttaatttccgttctgccagcggatgtttcttaatatttcggattgttccgaggtaattctccacagtaccattgctgagcgtacctgtttttaattcctcctctgcccacacatccaaaagttgtccgactgtgagattttccgctttggcaacaaatttctttttctcataatcatccattgcctgacggagcagtttttcagtttcacttttgctttctgttccaacgcattctttctgaacaagattgccgcttgcgtcctctacatagaagcggtagtaccatttctttcctttttttcttacagatccttttgccataatcgtatgtctcctttcgatattagacaatcggaactgatgaaatgcttcgtgcgtgtaagtatatcataactccggctgtcttactataccgattcggaatcttcgtataagacttctgataaaagatttgcaagcctttgctctgctgtttttggtttcttggaatagagccttacgatgtctgccatctcattaaaagcattgatggtgtgagtgatttcccttaagaacataatctcattatattcatcattcgattcaaaccctattgttttggcaatatccgtctgaccatcattccccttgaagtttttgcaggcgaactgaaaggaatccaaaaacagaccatattgttttaacatcagcagtaataaatcttttgaaaaagcatcttcttctttggtaagggcaagtggtaactgttccagaatatctcccatcgcatcacgaatctgtaattctctcttatccgtaatatcggtttcatattcatctgtttcccctttgagccattccacagatacatggagtgcttccgaaagaccttccaacaccatttttttcgtattgtcaatcgaaccattctcataacgcaggattgtagaagcggtaacacccatcttttctgcgacataaggctgtgtcagattcaattccagacggcgctgttttactctgctccctatcagcttgcgtaattctttatctttcatgctgactgcctcctttttcggtatgtatgaattatagcattgtttttctaaaattgcaatatgcaatataaagtttatttttaacatttcgtaacgcttgacaaaaagatgtgaaaaggatatacttacatcacaagaattgcataatgcaatttgtaaggaggtgattatatgacgcaaagaaaaattgcattatccatcgaagaagctgctgactatacgggaatcggcagaaacaccttaagacagcttgtagaatggaagaaacttccagtattaaaggttggtcgcaaagtcctgattaaaaccgatattctggaaatgtttatggaagctaatgaaggtcgtgatttgagggatagaggaaatgtaaaagctgtaacaagaactgtggcaaattaaaaaggcggcttccaaagaaaccgccaaaggttctatcagaccaaagccatgatatacctacacgcaagaagattataccatgtgcttcttctgatacgcaaccgagaacttatgtttgcaaaagaaaggagaatgtaataatggcaaaatcaacaaaaagttatgaagaacgaatgcttgaaatggaaaaaaaggaacaggaaagccttgaaaaagcaaaacgatatgcagcacagaagaaagaacttctgaaacgaaagaaaaccgaggaaagtaaaaaacgaacccataggctctgtcagattggcggtgcggtggaatccgttcttggtgctcctattgaggaagaagacatcccaaagctgattgtttttctgaaaaggcaggaagccaatgggagatttttctcaaaagcaatgcagaaagaaaccaataccgatatggaggaagtgtaatggcagaggggatgagtttttcattcccttcattgctttttcatgaagggcgcacttatggacaaccagaggtcttcccaataagtttgccacaagtggcaaccggtctgcgctcacgcttgccgggctcgttccgtcggcggggctttcagccagacctgctcatgccgcaggaggcactcttcgccagagaggcgcattccatgcaggctgctatgcgcagggcactcttacgcagagggcgttccggcaatgctgctttttctaaaactgaaagcaatgttgccggaaatctatgccggatacgtcagaaaggaggaatccagacatggcgatttttcattacacaatcaaaatagtcggacgaagtaaagggaaatctgttatctccgcttccgcatatctcaatggggatgtgatgaaaaacgaggaaacagggagaatcagttattacacttctaaaaaagaagtggtctacacccggctgatgatgtgcgaaaacgcacctcctgaatggcagatagtaccagaagaaaatataaaacgctttcaaaaatctgtccgatacaaaaggtcagaagataaagaagctgctttaaaaaaattcaaaatcacatttcagaaacagaggttatggaatgaggtattgaagattgaaaaaaatgcagatgcccaacttggcaggtcatttgaatttgccctccccaaagaatggagcagacaggaacaaattcaatatacaaccgactatatccaaaaaacttttgtagatagaggaatgtgcgctgattggagtatccacgacaaaggggatggcaacccccatgtccatctgcttctaactatgcgtccttttaacccggatcattcttggggaaagaaagaagtcaaggattgggattttgtcagagataaaaatggaaatatcgtgattgatgaatcccatccgaactggtggcaggataagaaaaaccctgaccgtcatggaatccgtatccctgtattagacgaaaacggaattcagaagattggagcaagaaaccgcctgcaatggaaacgggtgctgaccgatgctactggatggaacaatccaaaaaattgtgaactgtggcggagtgaatgggcaaaggtatgtaatgaacatctgcctttgcataatcaagttgatcatcgttcttatgaaaagcagggaaaactccagattcctaccatccatgaaggagctgacgcaagaaagattgaacaaaagttttttgccgggcaggaaataaaaggctcgtggaaagtagcggaaaatcaaatcataaaacaacaaaacacgttattgcaaaagatactaaacacctttgggaaagtatcgggtgcattatcattatggaaggagcgattaaatgacattagaagaaagccgggaaattatacccttaatggaatccatgattggtcaaatcgaagaacagcagaacctaatggcagaaatgattctggaaatgcagaaccgggacactcaactctctcttatgcaaaaacagaatcagaaattacaaaaattaaacaacgagttatccgagctgctcaacattttgccaaataccgaggaactgctttccaagatggaagaacagaaaacgaagatagagcttttggaaaacgaaaatcagcaatggcagaaattggcacagaagctgaacagcgaaaacagtttattactgaaacagaacaccgaattgctgaactggaacaacagatagagaaaggacgtgatatagatgaacgaatccagagaatcaaagaacgccgaacagttggaagaacttctgctcttgaccgaggagatacaggcagaactggaacagaaagaccagcttatcgtggaactgaatacgcagctcaacgaatctctgaccttgaacgagaaattaaacaaagagaacagagcattgaatattcaatcattaaagaacgacttgaagatggcagacagagcattgcggatcgagaaagaaaagctgcgaagcgcaaacgtcacgatagaggattgtcaagataaaatacgctgcttaacacaggaacgggattatgcccggacacatcagaaaatcgtagagataccggtggaaaagccggtactctatgaaaaatgtgaagcctgtgaccgggcagtctatcagaatgcaaaaacgaaatacgaaacacaaaaagagcgacttgccggacagtataaagcaaaaacggtaatgttccaaacaaccttgtttcttcttgcatggtattcgctgatatccactctttttcaggcaatacagtcagatgtgtttctttccgattgtaaatcattcttcaatgatttagcatcattcatacaaacctttgtcggatggacgattgatgccgggcattctgcggcacagattagtacaaaaattccaaatgcttttatagccggaatggtatattggttattgctaatattgattgtaggaatatgtatggcaggaacagggatgctggcgatactgatagaaataaaggttatagaattatataagaaaaactgttgggatgttattactctactaatgatactgacaagtgttgctattgtcatttattttggagaatcaatcaaaaaagtactgtcagtaaatcttctattgcttttcgtactttcgcagggcgcatatgttggaattagatgttatcttaaagtttggttagaaaaaagaccctattagtattttcaacttactgtatagacagtaaaattactccataccagcctagtgaaaatttactgtatgaaaagaagtattacagagaaaaaaggctgtaaaaacaggaacagccagcccgaaagaatttacggactggctgtatcagcagagtaatgtaattgttgagctgaccgagatatgaaaaactttctatcgtcaatttcgcattattgcaataacagattgcttcttccatgaatgaataagcaatattgtcatcaaactttcaagcataaacatagcaacagcaaaaagagtaaaagcaacaaccggaaatacaaatcccgtagacatgcctgcatttttcaaaaatataccgattgcatatccgccggggattccaacaacagcagttataagcaatgcaatcaaagtagtaaaaagaccttccatcataaatgcttgctccaactgcttatttgtcataccaatagattttagtgtgcccatttcctgtttctgtgataaaagatttgtcacagtaagattgatttgattgatgaccgcaaatatccacaagatggctgcaatcgcataagctaatgtaaaacctgcacgattgtctgattggtgttctacaataaaatcttgaagggtttgtaagcgaacatccctattgtcagaaacgagtaatttgagttcttgctcgattatctcctgatattcagcttctgcttgtatttcgattgcgtatgtacagtcataacctgcaagttctttgagcatattttccggcattctgaaaatatagccacccattccatcattgctggaagtgattgcaccaattttgaatgcttttgttattgttttaccactatgatttttgaaattaaaggtcacagtatccccaatttgaggtttccaatggtaaacatcataaatacgttcgggatcacttacaactaattctgtatcatcagtaatatttccagacaaaaccgctacatttagcgacgccaaatccttttcattatagccgagcatcaaggtgctatctgaaatatcattgtctgttgagaaatcaactggtacggtagcataagtaaatatattgctaactccctctatatctccaacacgctttacataatcagaaaaatattctttctgcaagagagcatccaaattttcactttcgttttctaaatcaatgctgattttgaaatctccgtacttcatatcccaataacgagccatactctcggcattaaaagaactctgataacttgctgcaaggaaaaatataactccgcacagtcccaatgataaaatggtcaatagagatttttttctgtttctggaaaagctgattttcgctaaatatacaggcgtaatacgatgtcttttgtgagtgcggtaatttacaattcccactggatttttcagggcggaaattggagaagtattcgctgcaatttttgctggtttacgagcactaatataaacaagcagtattccaaaaaggcatgcgccacatagagaaacaataaatgcaaatactgaccagccttttgattgcagacaatagctgatgatcgttcccatgatactaccaattaaaatccccggaactgcaagcatataaccctgtttaaaaactattttataaatttgctttttacttgcccctattgtccgaagctgtccgaactcagcaactttttgtccaaccgaaatatagaaaatgctgtaaattacaagtgcggcagctaaaaacaaaatggcagcaactacaccatataccgcataattactgaaggacaaagttgtatttacataatcatagtaactgctgactgtccaattattcagtccagtctcctctgaaatttgagataatatttctgttgcttcgtcttttgtaagggtatctgcattttcaagccaaacatatccattaagcaggttatttccacgtaattcccggcatttttcaagtgaaacaaaaacaggataagcggtagaagttttatcatgataaataccaacaatagtataattcttcaaagtaccatccagattcaactgaactatggcgttgatttccggagacttattttcactggcaaaaaaggcatctgtaacagcaatttcacttgctttctctggatattttccgtcaaaggcaggaatcaaactaagcatgtcatcatcataataaatcagagacagttctttagaattttctttcactattttgatattacaggaaagtcctacactttttacttcttcgtttgctaacaacttttctttactgtcctgcgtaatgtcaaagaaaatcccttgatgtaatccttcgatttctttctgattttgataaatgatattttgcactgtgagcaacgacatcattatcatagcaacggctacaataattgccgaaaggcaaaataagtttttcttcttatcaaaacgcacactttttcgtgctaattttttaattactgcactggtatcattttcaaaaggataattcataattcccacctcctttagccaacaattttaccatcttcaatccgtacaatgcggtctgcgagttgagcgatctcgttgttgtgagtaatcattacaatggtctgattaaattctccgctggtacgcttcaaaagccctaacacatctgcactggtcttgctatcaagatttccggtcggttcatcagcaaggataatcgcaggcttcgtaattaaagctcgtgcaatcgctacacgttgctgttgaccgcctgaaagattgttcggcatattttccagtttatcttctaaagccaacatatacacaacttcgtccataaatttctggtctactgtatcgccatccagttccacaggcaggacgatattttcatatacattcaaaatcggaaccagattataattttggaagataaatccgatgttacgacggcggaaaattgtcaattcatcatcattcttttttgcgagttcttctccccgtacaatcacgctgccggaagtgggggtatcaagtcctcccatcatgtgaagcaatgtagacttaccgctgccggaagttccaactacggcaacaaattctccctgttccacagtaaaatttacaccattaagggcacgagtaatatttggttctgtgccgtaatacttctttaagtcgattgtttgtaaaatgctcatattcaaatgctcctttcaaggctttctatctgttgataaagccattgtaaaccacaaatgttacacaaatgtccgagatagaaaaaatttttatcgaaaatcagggtgaaatgttacaacgctcggacatttcaaaaaaagtggttatatcttaccttacaggaagcataatagaaaattctgagccttgccccagctctgaaacgaccttgatatagcccccttgccttgttacaatctcacgagccaaatacaaacctattcctacaccctgttgatcgtgtacttcttcctcacgatagaagcgccggaagatggcagcctgattgctttctgaaatgcccttgccggtgtcggtcactttgacctctacgtacatttcccactgaaccactgatacagaaatctttccacctgacggagtgtattttactgcattgtccagcagattgaaaagggcttcgcttgtccacttgctatcatgggagattatcaaattttccgggcaatccacggatacagcaatttcttttttctctgcggcatatactatactgctcatggcttgtgcaagcgtatggaataagctgctgtctttcttttctaatcgtatcgctccggtttccaaccgggatgttttaaccagtgcttggaacagaaaatctagtttatcagtctgactgcgtatgccttgtaaaaagtccatccgttcttcttctgaaacaggctttgttaaaagtgtgtccgttaccatttgcaaattgctgacaggcgtttttacttgatgcgaaatatcagaaatcagcatttgaagctcctgtcgttccatgtctatcttgtgtcggtttttctgcataatctcatacaaccggattaagcggtggttgatacgggcaaaaagagtttcactatcatttgacttttgtaattcctcgtttccatcaatcatgttgtccagcgtccggcacaaattagaagtaagatgagaaaggcgttttccaaaaaacagcaccaatagccaaatccagaaaaatgcacagagtgtcaatgttccacccgctatgaaaattcgtgtatcctgcattataccgccgaaaataccagtaattaccagcatagagaaaaccatgccagcactaatcagtctacaaattttcttagcagaaaggttattcagtttcatttcttttcgcctcctgtccattgataacccataccgtaaaccgttttgatatatgtgtcgccatccgcttcaatcttactgcgaatgcggctgatagaagtagtaagggtatgttcatctacatatttttcatcaatgtcccacagcctttccaaaagttgttggcgggtaagtacctgcttcggatttttaagaaataggttcagcattttatattccatcgcagaaagcgctaatggtttcccgttcaaacttgcaaattgttccgaaaaatccagaaacaggctaccatcctcgtaaatatccttagctggtttgtgatgttccaacatagcgaacatggctttgatctttcgctgcaaagcactaatcgaaaaaggtttcgtgatataatccactgcaccagcttcatatcctcgtatctgatcgctttcctgatcgttggcagttagaaatataactactgtatcaggatgctctggcttgataagacggcataggtcataaccatttccgtctggtaaatttatatccagcaataccaaatcaaaaatgtttgtttttaatgattcagcggctgtccttgcattcagaacagaagttattgtgtaaccgtccaattccaaattataagtaagcgttttattcaaaagattatcgtcttcgacaattaaaatctgcttcatattgtcacttccttttctttttgcagatagtataacaggcaaatgtccgagaattgttacaaggacaaatatatttttcattttacagcttttttctgtgtactgcaattttataaaagaaaggacagcagtgtcaaattgctgtcctttcttttatcatagctggtagtgtataagcgtgggttcatcatatcgggtgtggtatctttaactacaggaaactccctacaacactatctcacttcttgcttaataaagttctaatgaatcttctgcatccacccacatctgtaaattgccatcaagatataatcttgcatattccaaaggctcatccacagccaatgaagtaagcgcacattctgatccatatgtggtttttaaatttttttcagcttcccagcaatcaatgcgaagcatatatccagcacttgtgtaaacatcaatactatcgtggtttatattatattctgcataaattgttctcatcgtatcttatctccattttcttttgataatcagttacagagttaaatatcgaaaacatttcaatcagttcaccatgtcgttattgttatatgttatattgtgttatgaaattttctttcccttaatttttcccatattaaggttcatgaaaagcaatgggaaaatgtaacacaagggaaagagtaagggaaagttcacttgctacaaacttagtattttcaagggtttgcgaagaatttgataatcaaatataacagttattaaatttcctaaaatatgtgaaatatcaactggaatttgtctctttcttacccattagcaatctgaaccaatttatcaattataacttgtggtatctcgctattttcataaccttgtttaatagattcgattgcattatctatatcgttattctttgcatataaaaacgctctgatatgacacatatacggaacatatatatgtggtaaagttactatcctctgattaagaacagtaatggcatcatcaactgtttgtacattatttatccactctcttatcagtggaatatttttatctatcacattttttatatattccaatgcaaattctatatcggacgtgtaggtaggtatttgatattgaaaacttgtacatttccttggattataaaattcttcctttgtatatccacagtcttgttctctttcatcctctatgtgattataccaagcatcagcaatgtgtatttttacagaactttctgtccgatgccatgtcaacttatttttactattgatatcagggataaaatcataattatatccccagcgcaagtatatgtgatttcctcttggataacataattcgaccacaaaacgccgattagcactccattcagagtgccatttttttatcttttcattatatttcaacccgaattcttctgacaaccttcgagatatgtattcgtcataaagttctcttttaatatattcatcaccatgtaaaaacttatctttatactcttcttgtgataatatttcatttgattcccttttttttgaacaaaaacccttactcaatacatcaaatagactcataagtaacctccattattgcaaatcatctcttgcttaaattccgatttatcaatttcattaaataataaatttcacgaactaactacattgtcaaaaaattcattacaagattcactattatatctttttcttctggtcttgactctgcaatcataagcgtaatcgcaaccaatgctccatcactgattatcttattatcatctctatataaagcattattccgagcaaggaattccaaaaataacgatgctgcaattcgcttacatccatctgcatatggatgatccttaatcataaaatataataaattagcagctttttcctctaatgacggatatacatctccaccaaacacactctgataaactgctgccaaaataccctcaactttaccattttctttctccacaccgaatacatccgatttaaatgaatcctccatgtgtgaaaccatttttttacattcctcatatgttattttatatataggcctgtttcccactggttttttaagagattgatgatcatattggtctaaaagcattaatgcatctgtatacgaggtaacagcctttaaaatgtccgattcttcaacctccaatgtgcttgcaagcatctttgtttgaatatcaacagttctttcaagtgcttgcaagcgtttttcattaatagcataaccttgaatcacatatttctttaaaacagaattagcccatctacgaaatgcgatgcctcgttttgaattaacacgatatcccacagataatatcatatcaagattatatatcttaggttttcgtcctccggaacttttatcggaaaaaccgatagaagtctcatccaactcgcctgacgatataatattattgatatgttcacttaacgttgcctgttttacttcaaacaattctcccatttgtttctgtgttagccaaactgtttctaattctggacttagctcaacttcaatatttatatcgccatctgtaaataaaacaatttcatttttcaaaaaatcaccctccttatgaatcgcgcacgggataatcttgccctgcgcatccgttctgtaaataagaattttcaaattagtctttgcaaataacctttgaaccttcaccatcgattacaattccctgacggttgttaattgggcatagattcaaatccgaaaattcagtcattattttctcagtaactttcttaaatggtgctgtaagataatgcggaagaacatagaaatcaagcaaatcaagccctgcatcatcttcttgtgagtagtcctccggcttttcatccatttgttcaatatattggatagttggagcgcatataatcgcacccgccgattcaccgatcatcagttttcccttttccaattccttcttcaatagcttatccgttcccgttttacggagctgatccataaggaagaaagaatttccaccagtaaaatagatcacatccgcatcttcaaaaacggactgtatcgttaaataagcctccgttgaaatatcaatttccgttacggttgctcccagtttattgaatagctttcgagccgagccgacataaccggtatagcattcacgcagcgaagctgtgggaataaatgcgactttcttgttatcaatttcttcttttatcaaacttcctacacttgaaaagtgcgaacataaaaacagtttcatccatatcctccttaataaactacgatttacctatctgtactcaacgatttcttcgaatggtttcctcggtcttttgtctggagcttcgtcggcaaagccaaccgcaacaattcctgtcaaccagtttatctttttctttcgatctcatctggcttatattttcttatacttcttctattctcaatttctcgtatcatagatttctctctcccttagagccttgccctcaaggctcattttctcctatgatttccaacctatccatcccaacatgacatttcagggaaagcacctcaacacctgcgtcctttgcctcttccagtgcaatgccaaattcgggatgcattgccgtattcggcctgacttcactgatttcctccatttgaatcacaaatgcaatcaagcatttatatccttgtccgcacgcagctgcaagttcccgtaaatgcttaactcctctttccgtcggggcatccggaaaatatccaactccgtctatctcaagggtgcagcctttgacttccattagatatttttgctttcctttttccatatagaaatccatccggctgtttccaaaggcatactccggtttaatacaatcatatcataacgtgtctttcgatttggattcttttctatgcaatcttccaaaatcacttccgcccctggcagcagtaattcacgacaacggcccgtattctttacatgaaccaattctacctcttccgctccgtcaatctttacccgcgcaataaaacgattgggacgttctatgaaaattgcttccactatcttatcatatttcatgtgctgtttcctattctcttatcattcgatagaatgttccagtaccaattcctgttgtcaactcataagcttgtccatcaatcctaaatcctgctttttgatagcactttatcgctctgatattccatgtacgaacttccagatacaacggcttgtcaggatataacttttttgaaatctcataagtaatcgagagcattcgttgaccataatgtttattacacaaatcaggatttacgcctattccgataaatatctcttctttttcctccaatatattgacaaatcctaccaatatgctttcatcccaaaaaccataataatttttttccctttggggattcatgaatcctatctgtcgaacttgcatttcttcataagcaggaagattatacaaatcgtattctccgccatatttccatgcacatatttgtcgttttgcatcttcggatagatttctatatactaattcattcataacatttgcctcgtcgaacttaaagttatcagtctgtttcatcttttttatagcttttattggctcttcattaggatgtgtggtatagaaaaacgctttggaatctcaactcacagcagcaatgttgaatcagtcctgctccagctttacctgctcacctgtgtctgcctcaaattcctctagctgcttaagccaatattccttatctttatttgttatcattcttatgactttacatggatttcctgccgctatcacgctatccggaatatcctttgtgacaaccgaccctgagcctatgacaacatttgaacctatggtcacacccggattgatgaccgtattgccaccgatccatacattatcgcctattgtaaccggcttgccaagctccacaccggtatttctgatcatcgcatctatcggatgacatgcacagtatatattgacccttggtcccagaaatgcatgatctccaatgatgacatcacactgatccagaactatcagccctgtatttgcatagaaataatctcccacgtgtatattggttccatagtcacaataaaaaggtggctctatataacactcctttcccatgtgtgcaaataattttccaagatattctccggttcttgtcatagtctcagacctcgaagcactgttgaacttatctaccagatccttcgccttaccctccggatcccaatccacacatctgtataatttacctgctttcattcttccaagcattttctctactctatccatagcattttctcctcgcatttataatatttactcatcatgtttataactgactaaaggataccattgtttatgtctgtaatcaacttctagcaacagaaaaatggactgtgaaaataggcccatttttatctatcttttattaatacacataaaggtacattccaaaccaatgcagcgcagcccccagcatcacaaagatatgccagataaagtgcatccccttggtgtccttcacaaatggaatcatgccgagcgtatagacaataccaccgcccacgatccatcccaaaagcggcttgtcatttctgaaccagtctggaatgaacatgatggcgctccatccgatgacgaagtacagcgtatagtgtatcggtcggaacctgcctggtccgaacacacatatgatggtgatccccgctatgatgagtgcccactgcacacagaacaacactattccaagcacattttcccagtacacaaggtacatcggagcaaatgttccgcctatcagcagatatatcgaggaatagtcaaatcttctccagatacgcttgactgctagcccggatttgtatgagtgatacaggcagctcataagaaacatcaatatcagtgatattccataaaaacacgatgccatcactttgagccctgtgtctgacttcaggagaagaaggacaaagccggctatggcaagtcctgctcctattccatgggtgactgcatttcccacttcctcaagcacggtgagttttggtggctcattcagttccctgtagtgctgcctttttgctctttttgcctctttcttctcttcttttcttttctctttgtccagctcagctttctgctgagtgctcatatctgattccgagttctttatttctgccatatttaatcctgaaactcctttctatctataattctatctataatttattctgctatctataatctacactgtcttacaaccgcagtttcctgcaccgtacagattacaaccctgggttcataatcgcagattgctaaagtgcctcaaacacctgcacgctacgtatcccactacaattactataatatacacaaaatttgataaaagagcaacaagtactcccatgctctgcttcagattcgagattcttatccgaaaatgattattgacagaaccaaacatccccaatatagctatgaaggaatcgaaattccttccagctgcataaaagaaaaacgaggcgaccaaaatattgactcttctttttctggatgtttctgtgatatacttatatggggtcgtatcagaccggaaaggaaatattatgctacaaaaattatatgtttttttcaggaaagaaaccgttttgtcaattgcagtgatcctggcgattttttctatgttctgggtcagaccggataaggcttattttacttatatcgatttcaggactctcgggctcctcttctgtttgatggcaattgtagctggtttgaaggctgttggtgtttttgatatacttgcccaaaaattgctgatgggaacatcgggaactgtgggtgtgatcaggctgttggtactcttatgtttcttcctgtcaatggtgatcaccaatgatgtggcattgattacttttgttcctcttgcactgatcattgtgcataaactgccaaaggaactgggcaattactggcttcttaaaatagtagccatgcagacaatcgctgctaatctcggaagcatgctcacaccaatcggaaatccgcagaacctttatctatatgccagagcagggatgtccgcggcagaattaataaccctgatgcttccctattccgccacagcacttatccttcttctggtatggatacaggtagccgctgccaaagcacctcacgtatgcggttccgaaaaagataaaactcttttgggattctctgacagaaaagaacttaacatggaatacctggtcgcttacctgatcttatttacaatctgcctgctcactgttgcacgtatcattccataccagattcctcttgtattggttcttatatatatgctgctaagaaacagggaaaatataagcagggtggattactccctgcttgccacctttatcgcattatttatttttatcggcaaccttggaaggattccgcaattcagcagttttctggaaagaatcatggcaggaagggaaacacttactgctgttcttgccagtcagattatgagcaatgttcccgctgcgcttcttttatccggctttacagataattaccgggctttaattgtcggaacaaatattggaggtctcggcacactgattgcatccatggcaagcctgataagtttcaaatatattgcaaaagaaaacaggaatctgagagggaagtatttgggaatattcacagcctccaatattatattcatgatattcatgttaatattgtatttttttcttagataaaagaatagataaaatgttaaaaaagcatctgatacataacatttgagatatatgaatgggatcgtactttttcattggaacatatccgacaggaatatcctgtttacggtacgacagactacagacacccggcaattgaattgttgcaggaaaatggaagcagggtcagtgagttccaatatgacagctatgagattattgccggaaaaccgaagctctccggattgccggcaacttacacagagtccgaggaggaagcgcagacattgcgcatcttcctgaaagacgctttgactggtgcaaaactggcgcttttatatacgatttttgatgaatatagtgcaattgcaagaagtgcttatattgaaaatgcaggtgtgaaaaatctgcatgtattaaatatgatgagcttaagcctggatcttccggataaggattatggatggtgacaaatgaagaccgcacgcttgcaatcgtaggctactatcgtattttaaatggagtgaatcagccgtatagccgtgtcagattacagggattgaaccctgatatgatttatgaaaatgtatggaaccatacagaaaattacggagatgaattaatgaattatggattgatcacatccgatgcgacagccggtgaagtgcctggaatgtgactccttgtaccgattttgaatctagaatatatatgctgaaaggcaaaaaagttcaggaggtaatgtagttgtattctttcaggcaagatcctgcattggtgcgggtaccattatcaatatgatatttgtcggatacattgcagactttatttgttatgtaacgaatgatgtagtgcagattcagatgaatctgccactgcatctggggcaggtatctggtcggtaatagggattggtacaattataaatgcctgcttcaacggtccattaattcaattttttaaaacaaaactggaaagatactgatggactaccggtttcttattttctttatcatttgtctttgtacatctcatgcatctattatgatatttttttcaaaatctttttctcttttgtcttagaaaaatcacttaaccgataggatcggatccgtgtcttgacaatgattggaattaacaaaccattatttaccagctttgcacatctattaataatcgttttgttggttacaccaagcattttgcttacttcaattggtgtaaactcatataatcgcttttttaacagaaaggctaagaattccttttctttcgcatttaagtaggacaggcttccatctaactcatcgttctcggattcttttgataattcgtatacttttttagaatacaataccatcattcttaaaaaataattgatccaaatttccggatgaggaggattttctcgtccggaataatacaatgccggtaatcccatttgcagtgatgcataatactcatctgggtcataggcaaaatattcttccaaagaacctattccattaaaaccatatccataataatcaaggatatatcctgacattaatctggcggttctgccatttccatcttcaaaaggatgaatggtaaccaattgataatgaactatagcagcgataatcagcggatggtcatctgtagtatttacatattcaacaagctcttccagtaaatccggaatatcaatgtactctggcggaatatattccgctgcgcctgtctcggaatcatatactgcaaatagcatccctggtggcataggacctcttaggcctatcttttcttttgaagcacctttttcaaccattgcctgcacttctaaaatcatttcttttgaaaaacgttccttctttttcagcttttcttctaaaacatttaaggccaaaaagtaatttcgcacttcctgttccggctttaaaaaatgtttgtgcggatcactatcaatagcttcatttgcctgtttttcagtcaatggatttccttcaatcttattagaagcataggagctttttttcttggagttttttcttagcctgttttttgtaacaggtggcatttctatcgaactaagtgaaaagcgtttttcgtctatttccgatattctttttaaaatttcatttgtcagagtaactttaatcacatgttccacctccatttcatccatatattatatcgttttgcgaattgtttttccactaaaattacactattttttcactatttttcattacttcatcgtcttcgccacgctactgtgcctgaatcagccgtccgttaatccccttttgagaaaatataataatgatactattatgaaatgaacccccagtagtgccagctgctgggggttcttctctttttgttcggttgagcatccgattaggctaataaatggcatgaatgatttttgtttattttcctttatgaatgggcagccagtgctgccagcttctgcataattgcacttacatcctgcattacattcaaattttcttcctctgcctgcatcgtctcgcctgcgtgcgccgatacctgctgggaaatcgctgagattgtctgaatggaatctataatttccttatttgcattctgcaactcggaaatgcttcttgaaagagtatctgcatttttctgaattgcacgcgtactgtcctcgatactttcaaagctttcttctgcatttgatgcaccagtcttctcttcgttaattccatctatcatattggagacaacaccgaccacctccatgattgcattggacacgttgctgatcaactctgtaatatgtacggttgcttctttggttctcgttgccataccggaaatttctgttgcaacgacagaaaatcctcttcctgcctctccggcacgggctgcttcaatgctcgcatttaatgcaagaagacttgtttggttcgtaattcctccaatcagttctacaatggaattcatttcatccatatactggttcagattttccagtttttctgtaacctcggttccattatcaacagaagcttcaacttccgatgccaggtactcgatatcctgtttgccttccactaacgctttcagagtaagcgtcatgctgtttccgatttcttccacagcggttgcaacttcatccaccttatcctgaattgcatgtgtctgttccaactgattctgcacatgttctgcggtatcagtagcacctgcagatacttcctgcattgcctcagtcgttgtcttagatgccgctgtcagcttttcgaaacgtacattgatatctgcaatattgccggaaatctgctgatcaagttcctcatttctttccagaagattttcagcctctgcttttgcctgcgccacttctgtaaatctctttcttgtgttttcgcgaatcacttttgtagtcaaaacagaattcgctccaaccataatcataacaacaatctgtacaactgctgcttcgattccatgatacccaaaaccgccttttgtcgcaccgatcacaacaacaatgatactctctaatatggtacctgtattaatcagaagaagataacgtgtgtcactgtaaatggtgacaacaaaaatcatcggaattacaaatacataaatcagatttgtcggtgaggtaaaaagacatattgtgtaaaacaatgcaaatccataggaaaccagatgtttgatcatcgcatgttccgtattacctttccaacaaatcacctcgccaatcaaaggtataacaccaacgaccgtagcgattgtcatatataccggagacagttgtcctcttacgctttcccatatcataaaaaataccataaccgttaccgtactgatatgtgacagcatcgcaatgcgattcgaccgcgtcaattccgaaatttcttttgtttccaccatcataatacctcctctagaaaagtctttcctacttatatgactattcttctaatctttaaaatagcataaatatccacatccttcaagaaaatctttctattttttcacaaccagctgacttcccataatgatactattatgaaaaaggaaaaatccttccaatcagaggcatattgtcaagtgtgtatgtcagatttttatatattcatcgtcatatatgggggaatgcatataattccatcttttacaattaaatttcttggatgaataatataactttcccctatgcgctccttgtatttttctctgaaattatttaatgaagttgttttatattgctttccagactttacttcaatcggaaacatcttatattttaatctgctattatttgaaatgataaaatcaatttccatatcatttcggtgcttattttcattatagtgtgtataaaaatataacttatgtccattcgccaccagcatctgagctattgcattttcataaagcattccttcattaatctgtaatttgcctgccaatatctgtttatatacttcatcttcaagtaattcattctcatcaaatgcatggcttaccaaaagtccggtatcacccatataacactttacatagcttcttgtctcattcaatgataagccaacattcggatcattacacaaaaagcactcattggatatcatagaatccgacagccagaaaaaagtttcttcatactggtctgcataactaccatcttgtagctttttgaatacaactcttttttcatgctgtgaaagaaatcccggaatctggtcatagattgcaagaactttgcttctatatctcatatctatcttcataatatcttcccgatacaatttaagaatgtcccttttttctttatccgcttctgtaaaatcttttttactttcaataaatgccactacaggcataggcatcccaccaacaagcatatactgatgaaacaaaagcattgcctgattatgcgcatatatgttagttctaatttttatgattatacgcacattgcaattcattttttgattatacgcaagtattataaccctattttttatgattatacgcatattctataaagtcatatgttcatacttttcctcatttcaaatcataaatcttacctgattatatcgggaaaagcattttatattatatactgtgttattaattttctggaatttgcgacgattatatagtactgattctaaacggattttgaatttatttggatagtgattaaatgaaaataattaataatcttaaggtaatacggacacagcgaaaaatcgcccaaaagcagcttgccatggacaccggatatgatccgcacactagccgccgtcctctcacagcaccgtacgtaccgttcggtatacggcgctttcaatagactcctacggattcggtccttcacttctcggctactatgacctctgcacgaagcctatcgacaatccagcgtatcagaagtacatctacgcaagcaaaagaatcacagtctaccagtgtttctacttcatacttactcaattctttcgacgcattcaaacaatctgctttaagtttaattctgcaattgattcacctctgccagcacttcccaatgaccgctgtggctgttacccacacgcttaatcagttcttgtgttttcatttttcttaaataatacttcacacgatctaaattccatcccaattcatttgcatattctctttgagacatgaacggataattatggactaattccagtatctttttatcatcatctgataatgttgatttcttgctttgaatagattggtgcgtttgggtagtttgggtagtcacaccattgacaccaaactcaccttttaccttacggtacatatttactctgaaatcgccatcaaaatcaatcagctctggcttcggcagtcaatactcctcactggcttcaaataacctcggtattccggttccgcatttcccaataatcttcatatacgcaaaagctctggcaattgccggatttctcggctttgaatagccttccagcatttttgaaatggtaacattattcaaaagcattcccggagaagttacctccaatctgtcatcaaacaatgctacctggatatttcccggctcaagataactgcggtgtgccactgcatttgcaattaactcacgaatactgtctgtcggaagctcatatacatcctgtctgtacatcccaattatcgtcattcccatattgatttttcaaggacatactgataagcggcttccatttgctcctgaatagagccatcaaattctctacggtcaacaaagtgtgcacgattcgttcctttgaactacagtgttatcaaactcactcatggcttttgtctcccttcttttcatcgagatatgcctgttggttcattgctatcattgaccttgatcttgtatgtagtaccatttacactaacagtgtaattgccaaacattgatcttgaaagcgtatagctgtatgttccctcatatactggtttctcgtcatcttcacgaggtccaactgtttctatatacgcataatcaagattatcttcatctttgaatgtcagttgccaatattcataatgtatccaacctaacccttccatgtgagaatcgcttgctgtaaaagtttttccaaccaactctgacattacctgttccgtcatctcattttgatatttgccgaactgcataatgccaaatatgactgctattactgcaatcaaaagcacgatagcagtaactattgatttacgccgacggtcacgaacgttttttacgcctcgatccgttatgtccttatatttgctattcctctcactgtcttccttgtttacagttccccagaaagaattggctaaattattctctgaggctgttgccaaattttgcccacactccgggcagaattgatttttatcactaatttgcttgttacagtatgggcaaatcattggcttcttctcctatcctgcgattctatcaataaaccgcaaatgttccttcctgcttctggccgtctcctatcctaacagaatattgataaagccctttgttccacttgcccggttgagaatatcctaccccattccagcaagctattgtatttgaatcaagctcctgcaactcatatttattacaaaacaccgaattgtcttctaaacacgtaacttttataaatatctgaaccgtcatatcacttcctggttcatcaataaacaacttaaagtaaatatattcgagtgactttgcttcaaaagcggacttatagttatctctgtccttttcaagtgcgccacttgatttggaggcaaacagcttgacatctcttactcttacaccgctcttagtaagttttccaccatagattctaaattcctggctatatgtattatctccatcaagttcaactatccatttgtaaattccatcgctataaccataaaaatttttattgccccagccgtttgtcttgaagttcgtggttccaggttttaaggtgtattcatcgctaaaaacatccgaaaaggcattatctccatcataaatctgtgaacgaaccttaagcttacgtgttgtctttagtggttcgatataaacccgagcggacagataatctatatctcctgcagtaaaatacaagccggaatatccgcaactttcaaaagacattctcttgtactttataatctcaggtgtgttagtcctttgatcgacttttgctttttcctttggaggttctacctttttcgtcacagagtgcaagtgggaacgatctttaaggtagacatctaagtatccttcatccgcgtactctttcaaattgctaatagcattagagtcattttcattctcaaaaagcagcaagtcataatataacccacatatgctgacatctctcgcgtctgctgttagcactcgaagctcggacagcactccttcgggatcagattttgttccccacccaaaatatctcatagcaaatagatagggccggacttccggaacatggttcaaattttcaaatctctgataaagttcttcataatcatcggcggaaaggccagattttgagtattgcgttgttaattcttcaaacaaatattggtcaaatatatccattgatgtacctccttcctattatttcatcgaatcccactgcttctttaggcggagactcatcatctcagactcaccgttcgcaaaattaaaatccaacaatgtttcagagatgagcaatctgttagacgataaaattgcttcactgatgatagcattgtcatcaataagtgcattaaaagattctttcaaaaatccagatacagaaacgtgcggttttcctttgagatgttctacagccagaccaaaggcagtagaagaaaagatcgaaagagccgtttcaggagatatattctgaaaattttctaatgaggccagtgttacatattgctgactagtctcgaaatttgtaatttcatcaacgagtgattccaatgcgtcaggtgtgctggtctcacttacttcttcgagcattaaggaatacagaaattgaaagcgaatagtataggagtcatgatattcttcgtaatcgtcatctaaaacgatatgtgcaactttatccatgatttcagtgaataacattttcacgaatttaacctccaatcaatagttatttacggtagtgagcgttcaagttcttctttatatgggtctccacttgaacttgaactattatgttgttggcgaaccgctctggcgtcagcatcaaccttttgctgttctagggagatgccagcgttaagacttgcagcaaacgaacgacgttcatcttttttggtttttgaactttcagcgcttggtgtggtgactgcgctctgtttcttcttgccaaaaccgaaacgatactgaacagatgatcctgcagatccctgattagttttttctgggggactgctcattggtgcatttgtaatcttggcaccgtccgatgcggcaagtttacctttttgatattgttctagcctttgatagatacgcagctttgcgtttgccctttggaccggagcatcaaaggcataaggattaacgtaattgtaatggtgcaagatgtcaatatcattacagagcttttcgaaagccttgcgattgccagcgcaagaattaacatcatctcgtatgtgggacaaatcgttgtgcatatatgcgttaaggagcttatctgcaccacaaatcgactcgaactttttcataatatcaacttcatcggtgtaagagtgcgaaacgtagtcaggattaacagtttgcatattcttgatagaatacatctcggttattccttcgttcatgccgacatttccgaaaattatatcagagttaaggacaccaccttcaacattccgatgagttttggacagcaagtgcattgtttcgtggtctatagtggccagcaagtcgccaacagatgcgttaccatctatattaattcttatggtatcggtcgctggtgagtaataaccacaaatgttagggctgtaactccttccgagttccttttttacatcagcttctcgaatgaacgagatctttcgagttaagtcagagaagcgttctgcagaagctgtagtttgatatttgcttttcagattagtgatagcaatatcaacgattgtttcgagattcttttttgaaagtttgtttaccgaaacatcttttagagcggcaaacttttgactcaaagaatcaacactgcttgcaggagtgtcataggcacctgcaagaatctgatttatcggtctcgatgcagagtgttctgtactggacgttcccttcgttcctccgatgaaatgtccaaagaactcatgcgcacggtctttgatcttcgcattaactgtgcctgcatccgttactgatatactacgcttggtcattttaccgtttgcaatagcagtaggatacgcagttctatgtaatctttgccattcaggatcttttgaataaatcgcataatccgtttggctatagttatgttcgttcatatactctcgcagatgttgccttgccaattcagagccgaccagcgctgcgacgacacctgaatccgggtaagccatctgatggagtctttgccattctgcatctcttgagaacgttgcgaaatctgcctgggtgtagttatgggcatacatatattcagttaaatgttgacgagcaagggcagttcccttgagtgaatccactaggctagaagcaggatgtgcagctttgtgaagtctttgccattctgcattttttgaataggcagcgaaatcacccttgccgtaattattcgcttgcatataactgtttagcgcctgttgtgccggtgtcattattgtggctgcgtattcgctcgtgtcattcccataaggtttatacccccatgattgctcctcgccaatataatgaccatcttcggtatagttgtaagggttaagccaatctgcaaaagaatgttgacgactacccggactagaagacgatgctcctggtgcagaagaatcagtgggaacaaactgactttccatattttgagatgcttggttgcttctgtacccatcggcactttggaaagtgacctgcggtgcagtgacatctccaaacaaacttaaagcatattcgtttgcaccttgttctgtagaaaaactttgcggtgctctagtgttaatggaaccttgtcctgagtgataattaggcattgtagccggggtagacagctgattctggttagtgctaaactggcttgctgataaaggtaatgcttcgccagaatatcctccggtgaatgctgatagcgggcctgttcctgaaccgttatctccaaggctggttccgacttcccccgaagctgcattacctgagccataaggaccaccaaggcttccgccggaggctccgtcaacggaacctccgaggatgcctgcagcttgggttaaagaagaaagactcgtttgcaacgaattttgtagtgtgccacctacaccagcgtaagccccgtacattccaccggccaaactgatgttgttagaagtttttctcgcacgttcttggatttcaaacaaggtctgcgccttttcttcctcaaccatttctagttcattttgcttgttttccaactcattgcccgtagagtctaagtcattctcgactcctgacaattcgttttcagcggaacttttctgtgcttccaaagaagcgataagaccgtagtcgggatcaccatcttcgtcggtatcttcgtaagcagcagcaatagcagcttctaaatatgaaattgtgctatataatgaacttcttctgccagataattcagacatacgtccttttagattttcgatctggcttttggtagataattcatggctacgaataccttcggctattccaacgaagtctcttgatctaacagccatagtaccccccttctacgtgattgatgtgccgtttagttagacatatcacatatctttttcatggttactgatagtttgctccactcagctttctttgcgtcagacacacgatcatcttgtgacaatcgcttcagcattttagaacaaattcgccagttaccattggaagtaaatctgattgtttccttcgcttgctctcccagagcagaaactgcatttaggaacttaatgtagtggtttgttaggagataatcgtactcaaaggtgttaatttccatacgggagtatacttggaacaaaacgttgtactgcttgcacagattagttacaacatccaaatccacattatgagctgtcatattacctaattgttctacacggagacgatggaagcgggagaactgagcaccaagttcaagaacaacaatgtcatttgttcctctccagagttcctcatagccgttccacaaggaaagaattgtctctgcttttctattgcgataatcaacaatctttctaaattcagcaagcatatccttggtttgggtaagcaagattgttcggttaatatcctgaagtccactaaggcgtctaaaaatacgcaccacataagctgccagtgctttatgcagtaaagtggctcgtgtgcggtattctgttgcctttttatttgcttcagtccactcaacggtgccaaaaatgaatgtatcttcaagccctttttgtagcttctccgcaagaccatgagtggtagagtagtaggtttctgcaatctggtgatagcgccagaaacttgcggtaaactctttgcagaagtccgtaaggctttcctccatgtcattttcttgagacaggagttctgtagcctttgcatagtatttgtcagcttctacatcaatttgattgctgatatagtcgccggtctcataaatcgcattgtcataaccaggatgatttgccaacagtgcgtcggaagaaagagttctgaaatccacataacgttcaatgtcggctgtaacattctttgtttcttccatgagaatggcttttagctgaggaacatcatgcaaagatctcattattccgaacaaggagaggtagttgttgatagtacacatatacatatcatccgaatatacatagtaattcttagatagggtcatgtacgcataatactggtttgcaaagccccaacacagcttcttcaaatcacgagtcagtgctccggtaaactctctttgtttcttttcgtaagccagtttagtttcagcaatatgcttcttggtttcagcaatatcatcctcatcgaagagtcgttcaagcttgctctgcagaccgctaagattattggatacataatttaactcagcatactttttgctgatgcttgcttttagggtctgagcctgattcctgagcaggtcaaactctacacgcattttctcctgcataataactgcgcttcgagctaacagtgcattgtaagtcttgtttgtctttaatcgttcaaacaactgagtattagtaggagaatcgtattttttctgagaaacacctttttcccattcgcagactctcatcttgaaaggtttgagaaggttttcatagaaaataagtgcttggcctgtgccaaacgtgccttgttcttccaactggtcagcagaagcggacatagtgctgccaagcaaattacggtcgtcctgtgctgtaattcgatggccaagtttgagaccagtatttttcagaacttctggagccatcgcagtaggaagctgatcggcaattacgataccttctcctaaagctcggacctcggcaagcattttgacaaggtatttggttgcagagattttagggtcaacggaaccgcctacagggtcatctgttgtaggtccgataaggttatgcgcttcttcatagaaaataatgtgttcaatttcacgcttaagtgcgctttcatttgctttggcgacatcacttgttttgcgaatcttaagtacctctcgaatcaatgtggaaatcaagagggacataaagtttgcgggaccttcgccaagtgcttccagttcgatgataaccggacgactaagccaatcttcaggttcaatgcttgatttgcggacattataaacattaccgatttcacgtcgtaaaaggctaccaattcgcacttccataacagagcggatatttgccttggattcaccttcgtagccagattcttccacagctactttcagtgagtcgtacaattcctgcattgtcgggtattcttttgttccgttatttcgttcgttaatattccagcccttatcgagatagactttctcaatacagctatcaatcaagaacggagacggaggaatcagttcaaatgcacctgcaaaaacagcattcaagttggcaatatgctcggcaagtgttagacctactgggaactggaacggattgatatgcagagggaaatatgtatcagcaccaggagagaagacacagagatcttccataccgtcaatcattgctaatgctcgatattcctgttttgcaggttccagcacaaggaagggaacgtgctgctgtgtgtcacgccagagagtcgtgactaaatacaacatggtgttggttttaccggcacccggaacaccagcgataaatgcgtgtttcttgaacagttttacagggaaggtaacatcatatcccatggagctaacacccaaggaaataacctcatggacttctcctgtatctttgtctatgctaagttccttagagaaaggagtaggatcagtttctttctgacactcgatagcttcgccagggtacaaaatcgggaaggagaacatcggacgaatctcctccaaggtgtacagcgataggaatggagcgacgtaattgcctgcttctttttccttgtgaaggattttggcatcactctcatacatactaaagccgttttcggaactcattgtctcaatcagataagttccggattcaaccgcttcagcagctacgctatctgcaagcattacggcaatgtcctgtgaatcagcaaaagcaacgacatttgcaaggaactgagggaatttcatcagattattgagatacttatcccaagatttcacgatgctttcgctgttgtcatctttaccctgtactcgatccgaaattctgcgtcgtgtttctgtgtaaggcaatctttgacggatggcttgtgtgtgttctactgggaaaatatcaatacgaagaacagcgcttcgatcatatccttccatcagtttcagaacgttataaagtctgccggtttcgcaaggttcccactccatgatagagtagaggttgatttcaccggctccgtccgtattcaatctattttgtgccggaagggaataatcttttttggtcaaaaatgctccataggcaaattttttctccaacacaattcgacccgttttatcaacaggcattttattgaagctcaacattgcatctgcatcagatgcaatctcacaaacgatatgagagcgtgtgccaccagcaatttcctttgctgcagtaataacttcttctggcttggttttaccaaggctgtatttttttatggctccagaaatattcgtcaacttgagcaacggaagaacagaaccatcagatagtttctcttcctcgatggcgaagttctgagcaatttcatagcaaaaaaactcatagtaggtgctcaaaacagaggtcgtcaaaaattcacgaattccctccagcttggtcttgctctgagaagttgcatagaaaatgatggataagtggtgtcctttcggaatgctcttatccgggttgtagtagtacagcaaatggaaatacacaccagaggtgtatccgagtctatgtaattggcgaaggaaaacgccgtgcttatccatgatgttctcaacgctggaaccatcaaagacgctgtactttgttagtgttaaatctggtagtttgtttactgaaaaacagaggtaatataattgatccatttagaagactccttccaatgcggctgcaagctggtcgtattcagactgcaactcgtcatttacctgatcgctttcctctgcaatttcctggaattcctgtccgctttcctgaagttcgctagataattcacctccaacctcagaatagtctccgaccatttcagatgctttttctgcatcagccatttcggtttcgctatactcggtagactgctcagaggtttcctttaaggattcaccaacttcacgtcccggttccttaacttcactttcggcaatcgctttggcaatgccatccgattcgcttctggcagcatcaagtgcagctttatcatcatcgtcaatggcttcgatttgttccattgccccctgagaggcttctgcctcttctaatttctgttcgccgctttcctgtacttcacgacctttttcctgatcgctttcaaccttttgtctttgttcaagtttcaaagaacccatgataatcctcctaagtttctaattatgtatgtctgttttaatcgaatgcgtgttcaagttcatataccatccgggcaagttcttcgtcgctataatcccacgactcattaagcggcaaatcactatcagaagactctgcggtttcatgttcatctgcattttcaaaaatggagactattgcttcggtattttcggcttccgcaatcgttttagctatgtctatgtggtcacaaggcgctaacacagatttggcagcatcaacagaaataccaaattgttcaacaagttcttcgacagtatatttttttccacactccatgagagctgtaatatcgtcaatgtctatcgcttcaatgtcttcgagtggattaaaaattggagcatgagtgtaagattctgcttcttcgagtctttcctcgccgcattcaacgatttcctgactccgcaaccgttcctgctcaacacgtcgttgcgcttctaattttagttttcccatgcacacctccgaaaaataagcataatgcgcagagccagattttataacccgactctgcgcatcgtaattagtgcagtttagtgctaatatcgttcagccaatcttcgtcaggtgcctggtaaggacggaacttctgattatctcttgccttgttgtaataaattgcgttgttttcactcatcaaactgatgtcatttacgccaacagaacgagagaattcttcaggagacatatcaaacgctaccttcaggttaaagtaggacatgatgttattatcatcttgttcaagagcgctgtagctatcctgccagaggattgcgtgtacgccacgttttgcaccatctttcacgatgaggtggaagatctccttaggcgagagctgaggcttattggagctactcggcatcagattgaacaggctgtcaatatcatcgccctgagaaagttttgtctcagattttagttcttcagcacgctgatagccaaatacaaagaaatatttatcggtatctccgataggagtagtacctttcagattgtcaagcagttcggacaatacatcttgtgtagcgctttcgtcgccgcaatgaatatatctgacatattcaggaagcaactcacttgcaataatcttaggagtgtccttgaaatagctatcatccaaaggtttgcaattaagtagataaatgaacggctgatccggtgccttgccatgtttaatcttgtagttaatgcagagactaaggattgcaaaggcaaacatacttcttgccttctcggtatcattacccagcatcaacaagttagaattatcgttgcgagtgagatccatattcatgttgtttgtaacactaagcggttcgccaatgtacagacgaccaggaacaggacaacggtttggctcataattctggaactgattgaagatactgtacttgttatcttcgatattggacagcagaatacgagtaggctgttttgcataggaaattgttttatcgctaatttcctgtagcatacctctgtgtcgttctggttcaatataagcaactctgaagtggctgttatattctttattacctgcctcagagttatagacagcacgaccaggatcatcaatagaaatctggtcaatttctgtgctaccgttatcaagaagcagatttgcatcagccttagaacacttcagcacaattcgtacagccatctgatcgaatacagcacggtcaatgccggtaatattggagtagctctgagaagcaagaatcagatgaactccgaaagcacgaccttggcgcacaatacgctccatgatagttgcagacttctttgcaaattcatcatttgcattggagaacaactcgtggaactcgtccataataaccagcacacgaggcatctttttgcccaacgcacggtactcctcgattttatcgacatggcttttcttaaagagatctgcacggattttttgctcacgttccagtgcaagcaagatgttatatccgaactcacgctcactttcgatagccacaaccttgaacgaaggaagttcaaaatcagcgtaaatcttgaactcaacaccacgtttgaagtcaactaagtaaatagaaagctcgtcaggcgaatactgagtaagtgctctgaggataattgtatgtaacaagctggatttaccggaacctgccacacccgcaatcagtgcatggtggctaccaccaacacctaaagtaaggtactgaacttcattagcaccatggataccaataggaattcggatgccatccttggttgtacaggtgctttctgcatcactgaccttttcgattccaattacaaccttatccgcatttttaatacccttcttcagaatagcaataataccgtccatctgggtttgacttggaagaggaagtccgtgccaaagtaacgccttatctttcactgtatccccagagcaagagatattcacaccattgcttgagtaatcgaacttctgaaaactggtttctatattcgagattagtggatgcgaacgctcagatactttcttatattggctctcattgcgataaatgattgtgaacacaccacatttcggaccggaattcacaatttgctctaataacttaagagattgatctgtcaatcccgccgggaaatccataagcatgatgacttgatatgcctcagcgttctgttcagccactcgattgtattcgtagatgttgtcaaatttcccctgcaaacatctctgggtcacattagaaatgtgatccgtcataattttcagcttctcctcgatatcggcaggtgctgaccaaatcttgccgttgataacctcgcttgttctatcatctacatcgaccaatcgtgtaaacatggcaaaactctcgccaagggtaacaggatcaatgaaagtaaagttaagcttcccaggaggcaacatcatgaacaaacgcattcccagattgcatgcgtcttttacgactttctgacgcccatctccattaaacctgaacagataattaaattcatgaccgaacgatgcgcaataaggaatgctgattttactccctctatacatgaagggatagtatctgctcaaaaaggatcttgtatagtcgctcaacccatgcggtgtaatgtcatattccaacgagctaatatggacattgcgaggcatctccccacagcactcatatttttcgtatgacggttcaagggcataaatccgcatatattcgtcagcaagctcctttggaggaaactgtctacaaaacccatctactaactttcctaatctctgtctcagtatatcactacttgatgaatagaccttattggtttcttgacggctcgaatgtctctgtgcagcaaatatatgagcggtttcttgcagcccttgatttgcagtagcccaattggctgtcatctgttcatgcgattcactaccaacgttactgtaattggagtgcaaagcatctctattttgaccaatcatgcttcgaagagacacaatctcttgattcagtagattctcagcaatccggcaaagactatagaacgaggagcatgcttttgccgcgccctttttcttggaactgtttaaaatctcatttacctcatatgccttggtcacaaaatctactttgccttgcaagagatcatcgattgagatatcagaggcaacagaagcattaccagtttctgctaaatatgtcgcattatcggttatgcttttctcagcacttgacactaaagcaagctgttctttacacttctgaagccttgcaaaaatcccgcttttctccccaaaatcgcgtgaaagcacaccatctacttgtttctgaaaatcagacacgatagaatcagctttcgatgcataacttttagctttctgttcagcactagaacggactttgctccattcatttttctcttcataatcccgttccttgacaacacgggaggcgacatcaattgtcgaacagctatctttgtcaaaagcaatcagcttcttcaagaaatcaataaacaatttctttgtaaattccacagtcaacacccctttcttagtcttcgtttaatccccaagccgcgtagtaatcttccatattcatttcggtatctgtatcttccgattgtatttcatttatatccgatgatggagccttttcttcagaaactacatttacagaagaaccaacgccaaccccggctcttcgcagaatatcattgaacgtacttgtaccaagcaacgcagctgcattcataaaatcgtacttgtcaccagcgataagagccgttttgtgccgactttcgatacgctcaatttccgaaacagtctgctgtactgttctctcgtaacttgacagtgaggaaatctccgaactaataagtctctctttttcgtttcttttggtcacaagatcagaaaacgatttgacccaagggtgttgcttcttcatactatcaatcgaatctttggaagattcagattgctgaagtacattccccatcctcacttgaagggaatgcaactgctcagctgtgcattcttccagtcgatatacttcggatttgattgccgatgctgcctgagctgctttctccaaccccatctgatgttctttagtaagtaagcgacaatccatttcaagcgcatacaacgaatgctctgtatcctccaaatcagaccaaagagaaaacaatttttcttttctacgttcaatttcaccttgcatggtattcttaatctgcatgatatcagtggcagatttgatgctatactcatgctcaggaatttccttcttcagcgaaattcttatctgagatacagctgcttttatatcctcatacgcactatgttcttcatccgtagagaattccaaagcattacaaaaatctgcatcctcatcacaaggaaaccctttgcagatcaggtcaattgctgtagagcatttgtatttagcaagaaggcgaagccagaaaacaccagccaaattaggcatccattcgaggaccgtgtaggacaatgcgatagcttcatcatattttttgtcttcaatcaacacgtccatgcgagcatattcttgcgctacattttcatgaacttcgccaccgcttatttcttcaaatcctgctgtgttgccacaatgaaaacacttcgcggctttgtgaatatacttaccgcactttggacatctcactattttcatcactggacaccacccttctttgataactcatcggcaatggaatcaacttttccctgaagttctgctgcttttgtcaattcattcattatctctttcatttgtgaactcgactggtatgttgtcgaaaccaatggcttatctgccgatttgtttctttcacatgtattgtttacgttcagtgccttttgcttcgcctcatcagcccacttaaccctttgtttacgggcttcttccgaattctccgcatttctaaaggccgtcacttcatctgcggctgctttcatcttgcaaattccataaattaagccaatgactgccccggcaatcgtgcaaaaaagcaaaacatgtctaaaggaatcaccactccacattaccggaatagcatcgcctccgtcgcagttgcaggtcaaaatctgacaagcacagtttaataattcaatgccgaaccctaaaacatatagaagcacagcaacacctgccccaattcctgctcctgccaacatacataatattgcagtcataagattatcccctccttcattgacatcctgttacgttctttgtgaaatgtaacgagtaaatatatccaaatcaaaacacttattaattggctaaaagaaaccccataaatcacacctctaacgagatctcctctaaaaaattcaataataaatcttccgatactataaataagtaaatatcttctaagtatgtttttgcttttccattctttggagcaaagcaagtgaagcaaatataagaacagaatcaaattaaaagcagcctcaatcagttgagtgggtattctgtatgccgtagtcacctcatcaaaaacagtagttgtataatttattgctatatgtgaatgattttcctttccaaagcaacaaccaccaaagaagcaacctatccttgcaattgaatgaaatagtggaatacatactgctaatacatccataatatagaggtcctgcttgctgattctcgccatgattccgtacgaaacgagtaacccaatcaagccaccataaaagacaatcccagttttttttattccttcccaagtgatatcgcgcccaagtcccacatctcggtatatccctgaaatacaccccaaaaaacgcgctgacaaaatcactataatcgccgatgcgaacacgattcttatattcttagacagcgaatactttttttctgccatcaaaactatgaacccacttattgatacgaccaaaccaattccggtaaagaaaaagtaccctggtatatcaaatatggtaaatcctactgcattaaacgcctccaactttctgcctcgtttctggttttatttagtgctctggagattccataaccttagtcatcgaatcactaaaaccatttatttgttcaatcatcggttttgtctgttcattattttggaagaaagctaatagtgccaaaaatgtagtccatgtcatctcacgctttccggtttcaatcccactataggtttgtctcgatatcccaattttttctgctatgatctcttgagatactctcacccttgctcgtaacactggtaactcatttctaaactgttccataagatcatgtttcagttcagcaacatcatctgtgttaatccccatgctaatcctcccttaaaatttcttagagtgctttactctacgaacccgacatcaatcaatattatttattactcaaacttcgcacgtagattttagctatgcaccttgaaaattcaatacctggcagttattcagttgtcaatgttcagaccttaagcagcttggagttttgttttcaacaatgcaggaagtgcatccataaatacattcgccaattcatcgattttttcgtctgaaagttcagtgttatctgaaagcattgttctgaacatttggagcagcatttgaaaagcctgtatccatgtgatatcagacatttcgtcagaaaagtataaaaagagctccccaagtgaccggttatcattggattcccggctttccagtgacagcatcatatatcgggtgaaaacaactgcggtatgcgcagtcattgcatcataggacagagaattacattctctgctcaagttaaggtagcttttgcataccttgaaaaatacctctatatcccagcgttttccataaatccggatgatttcattttcatccagatttacatctgtggaaatgagacagagatattccttgcgtttgttgcgattgcgaacataaactactttggcaggaatgatgtccccatccttcactacatcaaccataacagaaagcagatattttgatttgcctcgtctctttttatttttgttgtaaatggagattaaagacatatcttcaccatcgtagcgaaaaaacatttttggagattttttcaccattccgattacatctaaatccattcttttgacagcatgaaaggtgcttggagatgaaaaccagctgtcaaaaagaacatattttgccggaattgcagcttttttagcagcttccagaagtgcaagcatggcatgggttcccttttccatagacagctttctgcgtctgtaaccaacggttcttttgtctatctcagccgcttcattgatacgattctttttgttttctgtagaaagaagaatgctgtttaccggcaaaaatgtactcccatctgaccatccaagagtaagcattctaaatccgaagcgatatttatgttttgcgtggtcatagacctttgcaagaagctctacctttttagaacggttacgttcaaacatggaatcgtcaataataagaacattggcacggtcttccgaatccagtggaagaatagcgttgtttatgattctggatgcaaggattgtagtaaaacgcatccagttaatttgaaccatcttcatgaaacgatacacggtatcttttgcaaaatcaggagtattttttcctgtaagcagactcatatacatacttctgttggagaaaatcagcagaaacatgtattgaaaaatctccgttaccggagtgcctttccttttataggcattggcagctttcaaggctgaggaaatatgaaaccttgtgaaaaatcgtttgatagatttagaaatttgcttatcattttgagtcgcttgtgttatacttttatccatagcatgagcctccggtttgtaattgtttttggcaactcaattatatcaaaaccattggtttcatgctatttttatgccagttattattgaattttcaaggtgcataggcacattttaatgtgcgaagtttgagtttattatacatattgtcgcaccatttgtctatatgtcgcagacttcgactctgtaaaatttttcacatttcctctgtataatagtactaagaaccgcctgtattccgtcaaaatggcactaggaagtccaactaataaatgtcaataattaaatgagaaaaaatttattttgttttctgactaaaaaagggcaacttccccttggtgaaaatatcgttttttgaaagatattgattctttggatttacagtattttatgcagctacgtcgcatttggtagcattgtattgtttgatatgctcctgaggagcaatgattttaaatggtttgttgtataatatcatgttgcatactttatgtgaaacagccccattgctacgagttttggttttgaatcacacttcttgatatagtattcacgaatgactggatttttagcttctcgtgatatgaacatcaatcacagtccattttaaatatgtaattatcaaattgggaattttatcatctgaaatatgattttgaattttgttaattagaaaatcttgatttatattgtcgaaataactatgaataccaagttctacagaccatgtgtatccattttccatatacgttgtttcctactttatagcctctgtaacgcctttgttttccctatatgcactccttgtccgtagagttactaatctactgttaacatttctatataattaatcctatcaaattctataaatcctcacactccttgcaattactgtatttcgcatggaaatgtacaatgaaatgacaactaagatattatgtcaattccttataggtaatgtatatcaactgatactatcagtatctaattatgatactactccattttcatctcaaaatcaatctaaaatgttcaaaaagtccgtcgacctacaacaactccgtctctgtaaacccttgattttacagcattctatactactcctcaattattctttgacatcgacgggttttctaagcaaaaattacgcaaattaatataaaatagtactattcagctcaatataacaccttctaccccctagtatttactagcattagaggtcgacggatttttttatttatttcaccaaattcaatccacctcctaattactcttttctcccctggatagctgatatctgtttggctcacatgattttgtgtgttctgacaaaggtactaatgatgttaagtccatgatgaatatggtcggaaactttaggacaaaatctatgaatatactacaaaaagagctctttcgagcaatgtcattaagttaagaattttgacataattataaaacacatcatatttgcaattgtttgataaatatgatgtgtttttttcttttgtctatttttcagcacaacaaaaagacagattgtttatctgtcaaaaaaaccttataattatctatgattaagccactctatatagaaagcttacagatgcctggggtttgactttgcgagggtcttttcgaccaggtcttactggtaatacatgcttttctattaggttaatcacatcaggtggactaagattgcgtttattacgtagatattctctacaaatataaatggcgattgtaaagttcacctgttttgttttatcattatttttcatttgttttattacatgtgttgttattaattcacaatagttatacaaaagtaatcgcgcatatatttcttgtttaataaaatctggttttcgtgcatggaaacttgttaatcctatggcatattttaattctctgaatgaagtttctattccccatctcaaatgatagatttcctttattttttttaaatcaaaaatatttctatcaagatttgtaattattatttcataagaattagaccctataggaaatctaataatacgaaatgataattcgtatgttttatcactttttcgtggaagataatcaaacacttgatttgcaggcatccacttatagcctgcattttttgtggtctttgtatttttcctcgaaaaaatctgagtgatatctatatcaaactcatcatttggaggaagatttaacccagatgcaattccattactatttttatctttgacacgtatagcgaatttccatcctttttcaattgcatgtgcaaaaatgttatagttttcatatcctctatcagcaacaagaataacattctctagtttcgatctgtcaatcattgttgcacatgctctaaactcgttgtaatccgctgctgtttgcactaaaacatcggtgtatatacgattcaaaacatcataaaaggcatttagatgtagtttattaacaattgaaccatgctaattacgttcccaaaaagtttctggatccttttgattggttgcaatggtcaagttacttccatcacatgcaatcaaacgataaccatgataattattagtagttggaaggttgtcatccgtaaaagatttaaacaaatattcaaaagtctctggaagtacttttgaacgttgttgcgtaaatgctgacacagacgaagtatttttgttaaaatcaaagaaatcaagtagttctttactcatagtagctccatccgaattcatcatgattcctataaaagttttgaaatcaattttccgttttcgagagaaatcgacattggggtttcgaagaaataaacatggattgttagctaattccgaaatatggttctttagagaatctgaaacttgattaatataattgctcatatgcgttacctccttgcaatcaagatgttcttaattacaatggccgctttcgctacatcattatcattcaatagcgaaagcggccgcacatttcgaatcatatgtcaagcatttattacaaaataaaaagaccctagcatcatttctgatgctaagatcttgattggtcatcttaacttaatgacattgccctttcgagctcttttcgctttgtacaacattaaattgtagatgattactgtaagagtgaaagtacaccctggttagactgattagcctgtgcaagcatagactgtccagcctgtgcaagaatgttgttcttgctgtagttaaccatctcttcagccatatctgtatcacggatacgagactcagctgttgtagtattctcaactacgttgtcgaggttgttgattgtgtgctcaagacggttctgaacagcaccgagtgatgaacgctgtgaagatacctttgagatagcatctgaaatagcgtctactgcgtatgttgcagcatttcctgaatcatcttttacattaagtcctttaataccaaggcttgcagaatccatagcgtcaatattgacctgaatcttgtttgtcatgtcagcatctgcacctacgtgaaggctgaatgaaaggctgttagcaacctctgccttgcctgtagtaattgtaaatgaaccatcagccttattcccagcattagctacttcagcaactccctttgtgtcaccaatctggttggcagctaaaagctcttttgatgcaagaccatatgcaacatccttagaaattacagatgcatcagtatcatctatgccatcagtatcaccatcggtcataactttgtactcatctgttccaaactttactgttgctccatcttttacaagtgcttttgcatcagccaaatcagccactgcatactttccggctttttgatcagcgtcttttccagctgctgaatagttagcgacaattgtgatttcctgtccatttacagtgaatttatcgtctgctttagtaatcttatcatcgaatactgttgctacatcagcctttttacttccaatagtatatgtcttaccaccaatacttacgctatctccatctttaagtgcatccataacaaatgtagcagttccatcaccgttatctgtaagtgttcccttaagacctgcatcatgagccttcatgttgattgtctttgttccggcctcaccctttaacagatatgtctcattgaactttgttgtctctgatacacggtcaatctctgttgtaagctggtcaatctcgtcctggattgcctgacggtctgaatcctttgagtttgtaccattggcagcctgtgttgcaagctcgttcatacgctgaagcattgagtgaacctctgtaagagcaccctctgctgtctgtactgatgaaacaccatcctgtgcatttgtagatgcctggtcaagaccacgaatctgctttctcatcttctcagaaattgtaagtccggctgcatcatcagctgcacggttgattctgtaacctgaagaaagcttctctgtgctttttgactgtgcgcttgttgttacgttgagcattctgttggcatttgctgcctgcatgttgtgttgtactaccataatataatcctccttgtcccatattcatgggttattatgtttgacctctggaaatccttttcccgagggttttgcagctgctttgtgcttatttttatttaagcagttgcggttttctataacaagcggcttcccgggtgtggcagatgccacggccgcctattaacttgattagttgctttgcgtctttttctgacgttctttctcattccagatgatttgcttgatttgtttctttgcttcactggaaaactcaggttcgggataatatgtatcttttcgcttcgccgggtccggttcgttgttggatcttgcgatattcagttcttttggggcatctatcagtaatcgacagtgctttccggttccgcccgcgaacacgattcggatatcgtctccgatgttcacatattgcccttcctttaatgataatttgagcattttctacctccatgcactaaggaatagctttgtccatgcttttccgaattatgcaacattttatagtaaaatgttacattttttcgcagattaataagggggcaaaacaaaagttgattaaataacatcaaatatttatgccggtttagtcatatttcatcaagaattactttatctttaacgtgatatagttgaatccagtgagattaattaaaaatgatagaaaaaggtaaagagaattatttaaaaaaatttttttcttggggttaagttctaaaaatggtgtccgatatagtaggtgtaaagcaaaaaatgtaacattttactataaaatgttgcattttttgctttttataattactattattttgttgttgattttggatattccagggaagagtctgtcatgcggcatgtgcctgataatattttctaccgcaaaggagtattcaatgggaactacacagccaatccgaaataaggatgaactggcggctttcaggatgtattataaagatatccatccaaaccgccgcaattactgtttaattgttatgggattaaacacagcactaagaatcagtgacctgcttaaattgaagtgggataacgtatacaatttcgagcaccatgtatttcgctctcattttcttatcaacgagcaaaagaccggcaagaataactatgtcactctaaactgcaatgccaccgatgctctccggacatatttcaacgaacggcatccgactgaacatgagtttatttttacaaaggccacctgcaggaggcagccactaaacagagttcaggcataccgaattgtaaggactgctgccgaggagacagttcaggatgaacatatcagctgtcactctttgagaaagacatttggatatcacgcctggaagaacggcacaccacctgctctgctgatggacgtctacaatcactcgtcctataaagtcacacagcattatctgggtattgagcaggatgaacgtgatgagatttatctgaatcttgagctatagttttatgcgtattgaaatctaatatagctaaaagccagccgtttgcaaccggctggcttttttggggatatacaaatcatcgaaatcctctgttaaaccaaatgcattctgttctgaatcgaatttcaactcaatctgtgacatatctttcatctgcctggtactgttgtattttaaaattaaatttcatcttcagcaccaccttcttcctgtaaccattctttcaatttatcctgtaatagtttcttatccggcagatacagtttatactgtgatgcataaatattagaatcctccggcaatgtcagttcaaccatcgcatcatttttttcattgcacaacaatacaccaatggtaggattttcttcctctgttttttcgtatctatcatagtaattgacatacatctgcatttgccccagatcctggtgctttaatttgccaatttttaaatcaaataatacaaagcatttcaacagtctgttataaaaaacaagatccactctgaaatgatcttcttcgaatgaaaatcttttctgtcttgccacaaaagtaaatccttttcccaattccaaaagaaactgctgcaaattatctaacagcctgttttctaaatcagtttctgaataattatatttatcttcaagacctacaaattccaaaacatatggatccttcagcacatcctttgaggttgtaatcacatttccttcctgtgataagcgttgcactttgtccttatccatgcttaacgcaagtctctcataaagagaagaattatactgacgtgacaaatctctgactccccacttctctctggcagcttctatctcataaaatgagcgttcatcctcattttctattctcatcaattgtagataatgagaccatgttaccacaaacggatgctcctcttcaaaaatcgtaaacaccgtttccgatttcttgattgcaaattccgtaaacagtgtttccgaaattcgatccttatatgttaaataaaactttcttgccttttccagcgtagattctgaaaagccttttccaaattcttctgttaattttttagaaagatttattatgatttttttaccgtattcagccctgtgttttccctgctgctgtacttctacaatccacctgccaagagaataataggtcattatctggacattatttacctgctttgcagtaatgtttcgtgcatatttaattaattcaattgaattctgacataacttatccatattgatatcatatacagattcattgatttcatccttcacacattcaatcctcctatttcaaagttttcctatttcactaccgacggatcatccggtgatgaaacatctattactccatattttccctcatcattctgaacaatcgcaaagcagtcatgatatgcctgtgaaatatctttataccccaaaactttagtttatttcacattatcaccatcaagaatcatcatagccgcttttccatttattatgccagttatatgctgttctgctagtccattgtaaaactccactgctgcggcaagatctttatcatccggatgcccctttgatacaccgccaatcagcttgagcggtccgaacgtatcaaatcccttgcatgaaaaccttccgacaatgttgtcatgtttgtatgctatcacccgctcaattgacttaaagacaggtctgccgccatatgtgcagataagaaatatatttttattgtctgtgagattgactgatgcaaacttaagcaccgactgatggaactttccgccgtatactcctgatgcaaaaccgattaaatcatattccgacaggtctttctctaccgtctgtgtcgcatctatcagctcgacatcgtttgtctttgctatctcgtcaattatcttttttgtgtttccatgatgcactgatgcatatactattgctgtcttcatctgtaatgctccaatcctttattagtcttcctttgattttgccatcagcatctgctccagctttttctttccggtctcatagtctgtaaacacaattccctccataccaagccttctgccaccttcgatattctccggtctgtcatctatgaacacacactctttcggattcagattgtatttatcaaacaggcactgatagataccggcatcaggctttatcatcccaaccatagctgaaatgactttgccgtcaacaagtgacacaaaactaagttcactgtgcgtatgaagctcgaagtagtcctttggataattcgataacaaatacactttatagcctctgctctttaactccttaatccagtctgctgcatagtcgaatgcctttacgacaaaagcctttccctctttgaaaaatctcctgatatccgcctcatactgtggagccaccttaaccatctcatcaattatctcgttctcaggaattacaccacggtccagctcaacccagacagggttttcatatgttgcatgggctaaagctgctattttattttcttcaatgccaatctcacgcattgcctcgtccggctggaacctgaccagcacgtttcctatgtcaaatactatgtttttaatcatttattttttctcctataaccctgcatctcttcctgcaaaaagcaatgccatatgctaaaatatcgcacctgccctcatcgcgcagagcctcatcatatctcttctccttaatctgcgtcatagccgcctcacacgctgcatcaaggtttttcatctcttttgcatatttcacttcaataacgatgcctgcatccggatcctccggcttgattaaaatatcactgaaaccgtctcccgactcacgatttgacttaataagccagccaggattgcttccgcgaagcaggccgaggagcagaccgtgatagaagttctctttcatatcatcagaagcctttgtatcaagtatacttatcatgcggctcatcacgatgttaagctgtcttgcaatctgcttctcatctttatcgaggatagctctggataaaagcttcatggtatcatcatcttttacaacaacagccttgaaccactcctgaatctggagaacaaacacttcacgcacctctttatttggaatcaccagcttgtaggcatagctctcactgtcaggcagcctgacctcaccagccgtagtcaggtagcctgttgtaaaaagtacgctccacagattgtctatagtattgtcaatctcatcataagtcaagtcaaggcggagctgtttctcaacaaaaccacctgccacgagcttttctatctcatctctcgtggtctggtctgccttgtctacaaagcgcttcaccatgtcattgccactgctgttaatccagaatgcactcggccttgctgatgtgtcaaaaaccagctttttggcaaaattgattacatcccacggacaataaatgtcggtattaccgaaatgatagccatcataccactcctttacatcagggtaacgctcagccctgtcataatccgtaagcagcttcctgacctcatcatcagtaaaaccaaactgttcatcatgggcgatatctacaatggaattgatttcaaaattgttgagacctgtaaaaatactctccttggatacacgaagacagcctgtgagtacggcaaactgcagaaactcattagtcttgagtgcctttccaaagagtcctctgataagtgaaaccatctctttatagtaaccattctggaatgccttatccagaggtacatcgtactcgtctatgaggataacagccttctgaccatagtgtataaacaataactgcgacagactctgcagacttgatacaagaagctgctcatccatcgtatatttgccatcacacagcgaaatgatagccctatacctgtccttatcgttttctgaaagagcctcactatgctccagaaatttaaatttttctgcttccatcccaatgagctcagtaatcatatatcttgcatcatcaaatgaacgtccctcagcactcttgagtgacagaaaaataaccgggtactttcccatatatttgtcacaaagctctttgttgcctgaaatatataagccatcaaacaatgactcatccgtgccaacctcaaaaaaactttttagcatgctcatattgagagtctttccaaaacgcctcgggcgtgtaaaaagggtgacctctccaccggtttcaaccaattgctctataagctttgtcttgtcaatataataaaagttgttccttctgattttttcaaaactatcaattcctaccggcagttttaaagtactcaccatatgaacctccacaaaacgtatcaatccgctatacttagttatagtatagcggattgaggggcaaaatacaaatattattaccgttctgtgttccttagttcttcctttgattttgccatcagtatcattttctcaaacgactgtgcaaacctctcatcatcttcctctgtgcgctttttcggtcctttgatatgattcttatgtgagcttcgtctggctttcttgttaaggtgtctctccataagcatccggtcgatattttcatctgtgtaccatctaccggactggtggattgcatatgcaaatatttgcattttttccagcctcttcaaataaacgagattatttatccagatacctgaacatgtttatctggccatcacactcataatgctccattaaaggatttttgtatgcataaagatataatactgatttattgaatttactgcaacacgatcttgaaagtttatgtaatgtatttcggtaacaaaggtattcagtcaactaaataattttttatttcttgcaaatatataaataatgaaccatatgtaattgcaaagatgcaacgaataatatataatattcgttgcaaaggaggtttttatatgtcaaaaaactatatgcaggaaattaaaagtcgaatcctggcttccgaagatggctcagttttttccacttctgattttgcggatatcgctgataccaacacggttcgttcagcattatatcgccttgttaaggataatattcttcgcagaattataaatggaatttatgaaaaaccaaaatacagtaaattactcgatgaatatgtagctgctgatcctgctgccgttgcacaggcattagcccgcagttatcattggaccatagctccatgcgggaacactgcccttaatttacttggactttccactcaggtagcggcggtctggtcctatatcagtgacggaccttataaaacctatgaatggaattctacaaagctcgaattcaaacaccgaactaataaagaaattaccggtctgtcccatatgacaagtctggtaattcaggcattgaaaacattagggaaaaaaaatgtaaccccggaagttatccagactctttcaacaaaactctctttatccgaaaaacagacctgtctgaaagaagcaacggaatccaccgactgggtttatgatacaatacgacaaatatgcggaggtaatacactatgagaaaaattgcatgtctgtcagatgatgacagaagagagcttttccgaaataccgctgataaaatgtaagcgatgaataaccacacgggtatccgaaccagggaaccctaaattggcaggttcccacgattctctggaagttccaggctatcatctatgattccggaacacttatcctgtacaaatatactccacggtagcagctgttctatgcctgagggctcatttttgtagtccggcatatacagaagcagggtgtaaagatacttgtaagcattcaggttgtttgcttttgctgtctcgacaagactcataacgattgcagttgctttcgcaccgtcaacagagtcatgaaacaggaagtttttacgcccggtggcgtaaacctttgcttttcgctcagcggaattgtttgagatttcacatcttccatccagaagataattcattaacgattccttatgattcaaggcatacttaaccgctttctccagtttgcttcctccggatggatccagcgtgtcaatccaggaccagaattcatcccagattggtgtttcttcttcaagacgttttgcttttctttcttccggagataactccttatacaaacgttccttgaagaacagacgattgcagaaggcgactcctttttcagcaggaagcagattttcatcttcctctgtagaaatgggttcatccagtacctgctccgagttgatatccagaagccggattcttttttgccttccttttggaacggcatcaaaaaatttacggcgtgcatgagccagacagcagataagaattacatcttcaatgcatccgtatgctgcataaccatcgcactgtatcattccatgaaagcctttcaggaattcaatcggatagacgcttgcccggcctggctgatattcatacagtgccaccggaggcttcccatcgcttccactttgataaatccacatgtaggatttctgagttgcctttcggccatcctcatgcaatacctgacatggaacttcgtctgcgtgaataaggtctcttcttaagagttcctcatgcagccggctgtaaatcggctccagatattcaagagctcctttgataaaccagcgagcctgcgtttcacggggaatgggaacaccactcatgccaaaatccatctcctgccggtaaaacggaagataaagtcccgctttccggtacataatcattgctacaagggatggtgatgccggactgtgtggaaacagagacgctggagcaggtgctgcaacaatcgttgtttcatcttcttcatgacagccgggacagcgcatcttctgctgaaggtaacggacccggaacagttttgcagggattactcttaattcctccctgacaaatgtgtatcccataggttctaacggggtaccacagtccggacaaaacttctgatcatccggcagtggacatttgacttcacagattggaagcgaagcataaagttcttctcgggaagcctttggcttgcgaggttttgaactctttttggttttggccggcggctcctttgcatcatcctctgatatatcttcagctatatcagactccttgtctgctggcaaagagatatttttggaatgctcgcttgaaataccaaagaatctccggtttaactcggcaatggtttcttccagatttgcaatggtctggcgcagatcccggatggtattctgcatgtcctcgccgttttttgtgaggagcgcaatcgtattattctgttgttcaatgattgtcagaaaagtgttgatatcactttgccggttgctgctgtttgacatgatttaccacctgtttatttctactgttattataaaaataaatcaggtttttcgcaaaccggctgattttatgcatggtcattttgaccaataaaatcctgtggatatctaacctgagagcctgtaattcaatggataattccggattttcaggttagatatccaccgtggaataagaaaacgggaggaatccgtccggtattccacaggtggagcaaaaatagaaaaaatgctgttgataagcctggtatgagtcgctttatgaccggaaaaaagtttttatttttctctgttttgtacaaacatcagaagtcttttttccggcttccagctttgattgccttgggctgatcgattgccagcccctccatgagccatcggaattcctgtcttgtaagctggcgtgcttccgaggcattgcgtggccactggaaacgaccgctgccatctaatcttttttgcatcaggacaaaaccatccttgtcgaagtgtaaagccttgattttccggcagtctcttccgcaaaagagaaacagggcattggagtatgggtcaaggtcgtagctgtcccgcacgatagccatgagtccatcaaaactctttctcatatcagtgcggccggtgattacaaaaatcttggaaacaccggacagatcgcctaacataacttttgcagagccgttagcgtttgaacaattgtagactctgccgcagcattggtgatttcaatctgaatcccatgcattgagattttaatcgcagttgcagtaatctcctctgaactacaattcattggtaattcagatacaggattgaaattcagttccacaacttcctgcttctgacagggaatcacggcaccgaccgtagctggtggaatactgcatgctttattgcgaagtcgtttgacatggtaataaaaagtactgataccgatttggtgctccatgcaccagtccttatcagagagcccgcttgaccggcattcgctaatcaggtccagccacttttcatcagagtagtgcagtctttttgaactcatagtaattcactcctaaaggttattcagagtgaattcaaccggaatcaatcacagttagagcaaacggctccaactacaaatgcagctgatccagagagatactcactcctgaagtgattatctcatgaaaagttggtggcgacaaaccgtgcgattatacatcgcttacgataaaatgggcttaaatgatgctattgtagaaaaagacttctgggtatgctttaccctggattatttatttcaccgctgtccatggaaagactccatcacttttaagggtggaacaagcctttcaaaatcatttaatctgatcagccgtttttcagaagacattgatttgatccttgactggcgcgtactgggttatggaatactggagccctgggaaaaacgctccaatacaaaacaagatgcatttaataaagaagctaataaccgagctgagatttttcttgcagaacagttctgtcctaccataaaaaaagaactgtcattagaattggggtgtgacactaatatttacatagatgagaatgacaaacagactgttatttttgcttatccaaatctgttcacaaatccttccaccctaaaggtaatacgcctggaaatcggagcattagcagcctggacccctgctaagcttgcaagcattgaaccttatacagctgtatactacccaaaaatctttgagcagaaaaatactgaaattcttactgtttcaccagaacgtaccttttgggaaaaggcaacaattcttcatcacgaagccaacagaccggagcatctggatatgccacaacgatattccagacattactatgatctctatagaatggctcagaccccagtaaaagatgttgctttttctcaaatagatcttctgaaaacggtcgttgattttaaaatgaaattttatccaagagcatgggctaagtatccagaagcaactcccggcaccttaaagctgattccaccggaataccgctttcctgccctgaacagtgattatgaagccatgaaagaaatgttatatggcgatattccaagcttcaatactattatggaatcagttcgccaattagagaaagaaatcaattcactttaaaaattatttgaaacggcactggtcattctatttaatgacagcttatcaacaacgcataaattttagcgtgttgttaagcagtcattacttagcacctgtctcgaaatcacattaagaccaaacagttcgttatagaagtggattgactcttcgatattgtccactactattaatatgttctttagcttcatattaccaccccattacaatggtccacctcatgctgaattatctgtgctgtccagcctgtgtatttgccatgtttctttttgaaattctggtcgagataatccacttcaatctctttatatcttgtgcatggtctcacaccatccagcgaaagacagccttcctccgtctgaaaagctcctgattttccggtaatcaccggattaatcatggcaaactgaaatggtccggccgcaaccactatgatattctttttcacgccaatcatgttagctgccattccaacacaatggtcaagatttgctctcaatgtgtcaagtaaatccgtaaccacctgtttatcatcttctgtagcatccactgatttctgtgcaagaaacagtggatcacgcattatcttctttaccattatttacttcctgttatacctttcttcttaattttttgtccaaataataactgcatcttccctgttttccatcatatggaaagctttcatctacaccgtatccatcctatggcatatcagtacacctccaactattttaccagtcctcatcatcgtcatcaatagcatcatctacaccggcagcataatcatcatcgctgtcgtatctgtcatcatcatagtctccatccatatagacatcatcataaccatcatcgtatgaatcatgataatatttatttgaaccggagctgctgcttgaagaatctgtactgcttcctgatgaactactactattgtattttctggaagaatagctttttggtgtataactgcggcttccatcactgccacttgaatgataagatgaactgctgtctgacgagtatgagcttgattgtgaatagtcataatcataatacttcatctattgtctgaagattgaacaatctctccaatcacatcacacccctatttctcacattttcaaaactctcaatcctgttgagagtttttcacctcttcctctgcaatatcatataactcagctagttttctctgcagaatactcttatcaatcaacttagttttatattcagcaatcattgtctgcgataaacttctactcaaagaatattcaacgacatccgtatcagcatttttacaaagaatcattcctacactcggattttcatgaggcttcttaatatctctatccaatgcctctaaataaaagtccatttttcccatatattcaggtttgaaatcatcaatttttagatcgatagcaactaaacactgtaactctctgtgataaaaaagaagatctacatagtaatcattatttcccacttggacatgatattcctcatcaatgaaaataaaatctcttccaaattcaagaagaaattttttcatatttttcaaaattgctttctttaagtcatattctttatatggttctggcaaatcaagaaactctaacatatacatatccctaagaacacctgtcatatctttactttcgattgcagatggggcttttccattagataaaagcaacctctcataatatccactatcaatctgtctcgccaattcttttgccttatatttttcctttgacgcaagttttagataaaattctttttcttcatagctttttgttttagagataatatgcagattattagaccatgtattttctctcaacagctttgagagttctggtttatccttgtaagtttcataaaactgtttcattctccaaatattttgtgatgaatatcctctaattccaggttctttactcaatatatattcagacaaagccttcacagtagacttgccccaaccatttacatcaatttgttttgaaacatactcaccaatagaccaatataaatcaataattgtagaattaacctgatactcagctttctgttttgccgaataaatcattccaagtacgttctcaaatactcccgtaatttcaatctcgctcataccttatcctccttactttacctgccatacatttactcttttattatatcattttatacaattgatcaacttctgcttcatacaccgattctgtatgagaatcaaatagcatccattccactaaatcaaactgccccggattctcctgcagaaatctggcaactgtacgtaccgcaatctttgctgcatttacaattgcctgcacatctgttacttttgtaatatcaccttttactgtccttatcatatcctaatcactctctattcccaaatttatcccatagtgtgcgcacttcaataaggtttccggacggatcataaaatcttacaagcttctgtcctccgtcgagttctgtcagtgctgtagcatatctgacctcataccttcctgactccagctttttaactacaccttcgatatcattatcttcaaaatacagttccgtcatattgttatatggaatagtctgtatctgcatgctttccttccatattccggcatcctgtaataccaggccctccgacattattacattaccttcctatctcgaaatcacattaaggccaaacagttcgttatagaagtggattgactcttcgatattgtccactactattaatatgttctttagcttcatatgaccaccccattacaatggtccacctctgcttgtgtcaagtaaagaccaaaaaaatttattttcaagaactatcaaaaaacgatagttcttgaaagctttcttgtataaagtatatcatttaacctgtaaaaaatcatccacattccactcaaattgaatgttgccgtcatcatacattgtgatacgctttacatcctgacgaataagatccaagtcaaatgtctccattttggacaacaactctgcaggttcttcatcaataacgagcttttgtttatcactttcagacctcttataaccatatggagcctgcggtcctataaacttaccagcctttgctaatgtcgttcttgcacttcgtaccttttttgatgcgtctctgctatacatcatatttataacattttttaccgcaacctccattcctcctgttgctcctgtaaaattattactgtcataattatcatttactgatatataccttacttttagcaccggaaatacaaactccagatatcttccaacttccagataatctctacccagacggctataatcttttgtaataataacttgtatattgccttctttgacctgtgtcatcatttcttcaaatgcttctctgtcaaaccttgttccgcttataccatcatcaatatattctctaacagtataagttgaaagaactgcgtcagatttgatatattccataataagatttctctggttggtaatactattactttcatcttttgggtgactgcttttgttcccagcactagcaccgaaaatgccatataagtatactccaatcatgaaaccaacttacctttggcaggtttgacttattaaagagtgaacttcatggattcaggtttaatataaaaaatccccgaaagataattttcttcatttgatttttttatttgagtcttacattttagatacaaattcatatcttttaattcatattgataaattattttatctgataaaatatagataacattctcattaatcgtcatttgctctacatcatgtccaagttctatattatttaactctttggtttctaagttatatatagatatacttccaccttctctttttaccaagtcaaagtgagaaacgataagtatgttatcccatacggccaaatctagtggataatattgatcaaatgaaattgtttctatcgtcttgtcatttatcgaatatatgcaaacggtattacatggatgatcaccagaatctactgagtttgaaaacaatatgttgttgtcgaaaagaattgctttataatgagtacctccataatttgtaatatcaattttctcatcaaaactcagttcttcagcatcataaatgtaaatgtaagaattcatctcttttccgtattttgtagtagcaaatgcaaataacatatctttactacacaatagcttgcttacataaacaccttcaattttctcacttacgacttgattattttctttactacatttattaatgtacgaatcaccgtttaacgtattgcaagtataaatatttttatcattaacacaaatactattcattgccaactgattgatttcatagattttttgattcccacttttcaactcaattttcagaacctttttttcatccttaacattagtttttccttgaggaatcaaatatagttcatcttcataaattactggattataaaaaatacttcctaatgaagcgtattccaatggaagcgtagctgttttttctaaattttgattataaaagtaaattctactttttttactattaccacttgtttcaataactccaacagatgaagttgttagatctatattcgcactctctctatgcgtacatccagtaaatcctagaaacactattgcacaaattgtaaaaaatttttttttcatacacatacctcatctaaaatatcagcctggaaaatttgagaaacattaatttatacacaaattttccaggccgaggtgtattacttaacgagactacttctttaatttttttaaataaatcttctggcatttgtacaaaactttcccctatatatgatgataatgtttcagtatcaacccaaacctctgtatctgtaccaataaacttaacacacatatcacaatcttcctttgtaatatgagtatttgatggctcccagttttgacggcacaaacgaattatttgttcaatttcatctggattggatacaatatattcattatcattaaatataatctctattcttgttgctttatcaaacataccatatccttctccaccttttacctttattttgctactattttcattcatattcactattaaaaaaagtataattatcgtggatataaacactaacattgtaatatacgacttgcgttttacaacagatttattacccaatatcaacacccccatctttataactcgaattaatatttattccaacatttccccatccatcatttactgtataggttccagaattatgagatgtaaaattataacccgttacaacaacccaatgttctccatatcgtggatgagatgtcaatcctaatatgcatggataatttttaccaataattgttctaattctatctccccaactatatgtatttgcagttactgtagttggtttatagtattgcttaatatacaacgataatcctctttttaactcaatgtaattagtacttgttcccattcttgcaaatattattaagaaacttataaatttatgctttttaaacataatgattcctaccttcaccacaaaagtcaattttttctgatgtagcacacttacaataagataattatattatctttgtcataaaccatcggaaacacctcatttccttatttccttgcgtttttttaatgtttattcatagaatatagtcaatccaacaaattagtttaaagtggttattatctttctatttcaaatttttcttattatacttataataatacagtatatttaatgatttacaaacacaaattaagtttagtataaagtttttatatatatttcaactgtcaaatatacttttaataataattaactcactttatatacaccacttacaactttttctgttcctacggcagaaacattatttttactagtactttaaatactcgcattggagtcagctcattcaatcagattcctgtaccagcattttcttgccgtgataacagaaaaatccctgaatactttttatcatgcctgctcttatgccaaagctgattattcaagatttatgaatgtaactgccaaaatggcactgcaccttattccggaacagcttaaatcacagccggtgtttctttgcattgatgatacaataatctccaaatttggtacaaaatttgaaaatgtatcaaagctgtttgatcatgcaacgcataatggctgtaattatcttaatggacactgttttgtaagtctgatgttatgtgtgcccgtgtggaatcgtgataaaatatcatatcttgcggtgccgttaggataccgcatatggcagaaaaaagaatcaaagcttgagcttgctgcatccatggtacgtcatgtcatgcctgaattttcatcacaaaaaaatgttatcatactttgtgacagctggtatacaaagcagaatcttgtatccattgtcaaagagtatccaaaccttgatctcattgaaaatgccagagcagattctatcatttatgatcatttatgatccttatagtactttatactgtccaataatcatcccttgtatatcgaattaatgtttagtattgcaacatatccgcattaaaaaaggacgcaggatctctcccacgtcctcgcatttatctggctttatcgtctcttaccttcggtgcttccttatgtgccgcttcctgcttcacctcatccacacctctagcctcaaatgcatctgcattatactgatactcctgtggctcagcgaccattggtgcatatacaacctctgcttctactcgctcagcttctgccctctccggctctgtctgtttctgcgctttcgcattctccatatgcttttccttatcaagctgcacatccatcgccagattatccagcttatctatggatgcgtccaaatgaatctccattaatacaagcatctttttcactgctttcataggggcaagcaccgcctttgtaatgggatgtttctgctctttctgtgaataatccacctctggcttgtcagcaaaagtacgaaatgcattggttactgtctgaccggcttcacgaaatccttttgcaagaagttctgtctttgctatatccttatccgttgtcttgattgcacctcttacattctctctgatatcaagaagtcttttcttaattcctaagaactcagacaacctgtataatgcagatcttcccttttcttttgccttatcgactatgctcttaacacctgtgacaaatacctgagagattgttttcatcattgaccagccatgatcaataccgattacttctaacttgttattcattttcttcttcctccataatctgcatattcttttcatacatctacccatacctttcggtctgttcgccttttctctcttctttgctgctgaaatgtttataagcaagttcatcatatatgcgatcaccctctgctttagctttcataaggcatgccaaacagattgttacaataattactgctactactataaatactttcatatccagccacctctctttttgtgagatgacttacattcggaccaaatcagcttcctttctgccatctcctgctcctttccaataaaaaaggcaggacaaacagccggatacacttttcagtgcaaagctaatttagtcctacctaaaattattactattcaattttcacctctcttgtgtacacaaattacattcagaatttatattctgaagcaactatgtattctcataaatttcggattttaaataacagcgctgccttatctaccgattaaatggtataaaaaatagggactaaatcagcgtgaaccccttgttttcaaggttttcttctaacttgtccctattatatcgcattcatcatgctgaattatctgtgctgtccagcctgtgtatttgccatgtttctttttgaaattctggtctagataatccacttcaatctctttatatcttgtgcatggtctcacaccctccagcgaaagacagccttcctccgtctgaaaagctcctgattttccggtaatcaccggattaatcatggcaaactggaatggtccggccgcaaccactatgatattctttttcacaccaatcatgttagctgccattccaacacaatggtcaagatttgctttcaatgtgtcaagtaaatccgtaaccacctgtttatcatcttctgtagcatccactgatttctgtgcaagaaacagtggatcacgcattatcttctttaccattatttactcccttctgtccaggtatatttccaccatatatgtctcaataagtacattaattaataaaatttcatttttcatatttagcctttcatctatctgtatcctgatacttatgataccatataaacagctttctttggcagatatttttttagattgccatgaaaaatttgaaaatgacaaacctgcttttctttccaataagctttcctaaaataggaaatttttactatcctaatactgtttaatagcatcttaatatacattacacaaaaaaagatacaggcgaacctatatctttttcgtgtaataatatgattaaaggggcaaaaggtatcatcgatgcatgcttgcaggcaagtgaacctgatacgaattcctcttgtaaatatatttcttattcttcaattacaaagttgcttacattcttgcggagttctcctgccgaagcctctgctgtcttaacacctttcatgacttctgccgattcgcctgcaatagaaacggttttttgcgcaatatttgttgtacctgcagcactgtcatttgatgcggaggtaattccttcaatcgcctctgtaatattggaaattgatgctaccaattcttctgaggttgcactaaaatccgataccagatcattaattttagatgcatccatattataatcatctgccattttctcaaaatcgccaaaactcttcacaatatctgtatctacaaaatccaacagatgattagagtcatttgcaagatttgctactgcattatccacattttccgtcacggcctgaatatttgccacggcatctttagactgctctgccaatacccggatttcctctgcaacaactgcaaatccctttccggcctcgccagcacgtgctgcctcaatggatgcattcagtgcaagcagattagtctgtccggtaatcgcaaggatagaatcagcaagcacgccgatctgttccacaacctttgcctcttcaagtgcctgctccagccttcccctgatttctccgagcatcgtctgaactttctgtcgattctccaccgttgcttccttcgtctgtgctgccctcttatgaatttcttctgcttccgtagccccatcctgtgcacgtatcgcaatctctttcgctgcaccatcaatctgctgagtcatactgttgatctgttctgtcgatgcggcagtttcttcagtacttgcagcaagctgctcggttgtcgcagacacatcctcaatttccccattcagatttgatatactgctatccatcgcttccacaactgtatcaatatttgctgcctctatctttacctgggaaagcaatccgcatattgattccctcattgtctcaagtgttcctgccagctgtccgaaatcatctttccgtttcatcatattgtcctgcattctatgcgcaaaattaccacctgcaatcacttcaatctctgctacaactttctttagtgactttgtaatatcctgtgcgatcatgaaaacaagcactgcaacaaccacaagcattgcaacacatgccccaatcagtgtgattgcctttttcattgcatagctggaaaataccttgtcctgcttttcaatagcagtatcaatataatcggtataatttcctgtaccgaccacccagtcaaatggttcaaaatactcactgtaggaacgcttcggtgaaggtttagtctctccttctttaggaaatacataatctgtgtatcctccaccatcttccactgctacacgtatgatttctttcaccatcttgtatccttttgcatcctctgtctccatacggttcgttccctcggtatcgctgccaagcagaactacatttgttccatctgactgatcaatccaaaagtaacctgtctctccgtaacgcatctgccgaacctcatccgctgcaattttcttggcttcatccagcgtataagttcccgctttatatgcgtcattaatctccgacaacagggaaataaccacgcccacctgctctttaattgaatcatcataactctgacgggatgatgcatccattgtctccaatgctttatctttcacatcttccaaatccttgaaggaaacaacactcccaagagccacaagtaaaataaccagaaccagtatcagatttagcttggttcttaccttcatattcttcatatttttattctcccttccttggaactgatcacttttgtatattttacccaaaaatacaaagcatgttataaaatcagtatacacttttactatattttcgtcaatagcgatccaccttttatacgttttatctctctcaaatccataaactttgctgagagaatatgactttgcaaataaaatataaaaataagcgatattaatcttcctacgaaaaaaatcactctgatttttccatctcccttgcatgctgccttgagcaatatttgcagtaatatttgtaaatcagctcatatctgctaacattgcctataaaacaaactcttaaatattaaaattcttcattctggtattcgcaagtcctcttgccaaaatcgtctgcatcttttccgcaagaagagtttcaagattatacgacaaaacttcactattcccgccggacatgttttttactttgtctttaagttgtttcgctgtatgaatcataccattacctccacatacatcatcacttcatcccttactccaagtttaaccgcatactcaatcaatcttgatagattcttttccttcgaggacatatattccttgattgctgtctgatataactgaatttcatatttctttcgatctttaatcaaatcacaaatacatctttccttgtcatatactttaaccaaattaccgctgcttgacgggatttcacaggtccccatatcaagaatctctgggtttgcataatgaacttctttgtttttctttttgatatgtgtagcattatatccggtaggaacagtgaaacaaatatgactgtattctctgtcgataagaccatgcaaataaagggcggtctcgcccgaataaataatattcttatttcgttgctgaagtacaaacaactcatctggccacacattatctaagatataaatgccatgtgccactttttccatatcatgctctctgacgtattttgagacagatggctttgatacacctgattcaacggccttcgatgtaatcaaatacccattgtctttttcaattagcgattccaaaatatctgatgttgacatagttggcctccttatccttgatatttacttttgtgcttaaattttattatatttaagtgtaaaagtaaatataatccttatatgcttgcaggagtaaaagataacataacttcaaatacctcgtttaatattccttctctatctctccatctattccatacattttcttgaatgcatcaaggtctgcctgattcttaatcagcataacttcttctatcttacctgtatgaatgttcttaaagcctgcaacctgctcaccattacatatgctcgctttgattaccggtttcttattttctttatcatatacctttgtaactgtctttttcttaaatagtctcactctgaccaccttcttttgaatttgccatcattatcatcccagctgtagccctcgccacagccacatcttccctgttttccatcatgtggaaagctttcatctccaccgtatccatcctgctaatccacctattatagcaaatactccaatagctaccagaaacaaaattacgttttctacgatagaattcttgttatttctcataatcacacactcccttattagttgcaaatgatatcagctctttgattgtctttagtatatgactttacgagtcccaaagtatgccctcgcaattcgaatttttgttccaaaatcatcaatcaaaactttaatcaaaaatcgaaatcatcactttcatcttccatgtatgatttttccgcagcttcatacaccgattcagtatgagtatcaaacagcacccattccaccaaatcgaagctgttcagattatcctgcaagaacctgtttactgtatgtactgcaatatttgctgccaactcaaccggaaaaccatatgctcccgttgatatggaaggaaatgcaatagacctgattccattatccattgccagcttcatggaattaaaatagcagttagcaagaagctcctcttctctattccttcctccattccatatcggtcctacagtatgaataacataatcacatggtaaattataggcttttgttatctttgcttctcctgtttcacatccgtgaagtgtcctgcactccgccagaagttccggtcctgctgctctgtgaatagcaccatctacaccgcctccaccaagaagtgagttatttgctgcatttacaattgcctgcacatctctaatttttgtaatatcgccttttactgtccttatcatatcctaatcactctctattcccaaatttatcccatggtgtacgaatctctatcagattgccggacggaacataaaatcttacaagcttctgtcctccgtcaagttctgtcagtgctgtagcatatctgacctcatacttctctgactccagctttttaactacaccttcgatatcattatcttcattacaccgctcaaactcaatatacttagcacctgtctcatcaactatattctatgccgtattatttatatggtcattttttcatgaataatgtaaacaataaaatatatatctactccatatccattctgcgtctcaaaaccctatatgctttgattgcgtaaaatataattacaatatctacaacagtatatacaaaacaccatccaaaactcattactgcaaatatactaaatatcagatcaacaattccaaatacagttataaacagcaaccgttccagacttattttgtttataagaacaataactgccaatgaaattactacatgaacaagtcctgaaactactcccattgctttatctatcgtgccatcaagttccccaaataaaataacagatattaatatagcaataatcattaggccaatacttatattgcgaatatctttaccatatgagagaataatctcctctctttttttcctctgatatagaatttcattctttcttgcttctttttcttcttcacggattcttttttgttgttcctcctgctgagcttttaatcttccttgttcctgttgatatccaaattcaaagccaccagtaattttttgttcaacaacttctctatctatcaacattttatttccacaataattacatattattgcttcgagctcaggattaacttccatttgagctccacattttggacatgtcaaagtaattaatttcattttttcctctttttctctctgtaatgtcaattattatatcacaaatttaaagttatctctctgttatagagtgttccaattagttgggaaaaatggtacccttttatatacttcttcaagttgtacattcgaatcagccatttaattttccctctataacaaaacaatacgcacagttcgaactctaacgttcctatttttttcttactcttcttttaaatttacacgtaagataattctcgcatccaacaaatttaccaaaaggaccttgtattaatcgcaaacgtccaccacattcaggacatatattaggatcatatctttgcttttgtcttgctttttcctctgagacatttacttctgtatttatattcggatttcttgagcattcatagcactttcctttatttaattttccgaaaccaccatatgaagcaaatgcacttgccggagcaaattttccacagaactcgcactgtacccatctgcgtcctccttcatcagttaaaaccctatcttccggacaatcaccactatttatgacttttaggaattcctgtctcttctgtcttttttcaacctcaactctttcttgttccattcgggcttgttcttttttctcagcagcaattttttcctgctctattctttctttttctctacgctcaagttctgcctttctatctttttcagcttttattctagcctgttttcttcgttcctcttcagctctccaggcttcttcagcatgtatcttatccaactcacgctgataaataattgcctgcttatgcttattaaactccagttgtttttcctttaacatatcagacagcgaatgattatgatacattatctgtgatgaatctgatatgtcaaatttacttaatttatctcttgctatattgactttttcccatactccatcagcatttttttcataatatacaactgtcaactcagcctttgaataatcagctccatctacatttaaaagcaggcaatagccctgtctcttctgaattttcattaacccttccgggtactgtccatttgtttcggatttatcccctgacgcaacataaataattgaattaccattgctatgctgttcaagaatagtaaatttatcatcagataaattacggtattcattgcaaaaagataaagctaccttctttttcgctgacataaatgtaaattcatattttctttcagactcagatacagttcttataggaaccctgctttcaatatcatctgtatgcagtttatcctccagccaacattttagagcaatctttgaatcaattgaattaattccttcaacgggcatctgacatataccatcaaagccctcttttattctaaaatgctgttctcttaaatttcgttcacctgccaccagtacaagatttgctccacagccacaaggacagaacaactcattattacggctttttgctcgaagctgttcaagtttgtccggaatattaatttgtttaccatctatgacggtataaattgattcaattcctataaattttccatcacataatgccactgttctttgagccatatgatttcatccccctaactgcttcataagtttacattataattctccatcttcctgtgactgcctatatctcctctgataatagtccatagccctataatcaatcacatccttcatctgacaaaccattaccggattatcaattagcggtctcagctcttctctaagcccgattgccgcaccatctttcttcacaaaaaatccctttcccgactccaaaaggaaatgcaccggcatagatagaatcttctttaaatgttccttatccgatatggaattgtatttttgaatagtcatatttttatcgagatctttccagttagttccggttgaaaagtactccttccagcttgaaagcagctgctcttccgacacctccatcaggatatttccatgattataaaaagccataagcaccggcattttatacacctttgacatagatattttttccgtccattctctccggagtcgcggtgagtcccaggagaaattttggcttaaaataatcaacaattctctgatactgttcattaacagcatggtgaaattcatcaatcacaacatatgtaaaataatccggtgcaaagtaattttcattcagatattccactctgccaaaagtcgcaactgacgcaaaaatcaccgacttttcagtgcatttactatctccgttaaagaatccgtaatcatctgaatcacgtacatttttaaaagattctgccgcctgctttaatatttcctcgcggtgtgcaacaaacaaaactctctcataattttttgaatcaaacgccgcaagatatgtttttccgacaccggttgcagcctgaaccagggctctccttgcgccctcttctctcgtattttccagcgcacacaaagcctctatctgcgcgcctctcggctcaaatagcggtatctgatttgatgtctctttatcatcctgcaaatcgtatctgtccaagtcctttgatactgccggacggtgccagttctttgaatattttttcagttcttcatcgtctattactatggaatgattttcgaataagtctacaaaagtattgtaaaacttctcataattaatcggatctgttttattgctgaatctgtaattccactcgataccggatgtcagtgcacttcttgaaatattagaggaaccaatgtatagctcactgtaatccttgtaatgaaacatatatgatttcggatgaaatgaacggtttttctcattataaaaacgcaaatcgacctggtcaccaagcttatgctttatgagatacagtgctgatggctgcgtaatgccaagatagtttcctgtcagaatcctgatttttgcaccacgttttagtgcatcatcaagctcaccgagcagcattttcacgcctgattccatcaggaacgaaacaataatatccacactgtcagccttttttatactgtctgcaagctgatagtacagatacattctcttatccgcgcctccggtcattgcatctgtcgaatattttatttcatatacatcatctaattcttctgcagtattacgttcagccatttttcttctccccgccccggtcttacatcgcctgtaatccactcttcctttagttgcagattatctatttcatcaacaaactcttcaaatgtcttttccgtgaaatctgtgaaatagcggccatttctctcgccttcaaaatcaccatacttaaaggatgtgtagattatgccgtcttcctttaacgctttaaacattttcataaacacggctttaagttcattcttaggaagatgaagtattgacgagcaggcccatatgccttcatattttttgttctcatcaagctcttcaaatagcagccttctgacttgtattcctgtgtaattacttgcaatatgacacatttcctctgaaccgtctgtggcatctacataaaaaccctgttccaaaaaatattttgtatctcttcctgaaccacagccaaaatccaatatatatccgcgctccggcaacagcgtgctaaagcgattttgtgtctcataaaaatccacatttattgttgtttttgcaaaattatctgcatttttgttgtaatattccaaggttttgtttttgttcatcatgagtttattataccattaagcattgaaaaaaactatattttaaaacctaactgatcttcatcatttactttgtcttcctctatcatcaccgtcttatccttaccatctctgattactttgcaaatgactccgccgtctgtcacaaacacaatctttccttttgccttaccaccgattttgtcatacagtctgcctgcactcattgactcacccttcacggtgtatgggctgttggctacgtagcccaccttgccaaatccttttatctttacctgtattgcttcgttgtcatactcattgtccggctccttgacaagcttgaccttcatgcctttttccatgaagtcacttccgtaataatggttgcatcctgctattgtaaaatacatttctttcattgtcgtgtcctcctgctattataccggtccgtcgattttacattcatcataatatttgcacagcatacataagctgttgcagtgttttgaatgatgcagtgtcctctttatccagtaaataaatttttccattttgtcctatcctcctgtttttcgtaaattaaatgcttgtttcttatgatggctatagcttagcattttacgagtcccaaagtctgccctcgcgcatcgaatctttgttctttattgcaataaaactacaaaaaaggacgcagattctctcccacgtcctcaaaactatctggttttcctccctgttggtgcaggagcaagatcataaatgacagaatctgctctggcatttccaatgagatcacaatgcgagtattgaaagtaccagtaaaaataatgtttctgccgtagaaacagaaacagtttcaaaatatgctagaaaatatttatgaagtctaccaattaatgagttttcattgtataatgtctttgtcgtacaggttcactttcctttttaatgtttttgtgcaaattcattatacatcagaaagccctgtacaattttttttatgaaaaaagttgtaaattggtgttttataattaactcataaccacaagagaaggtgcttttaatggctatcataaaataattcgacaaaagatctggtatgtgagtaacaaatcgaaagttgaaggagaactggcgatggatggaaaaagtcgggttttcagacctgaggctgaaaaaatttggcatgaagattatcaatgtgaatattacaggggagttatcatagatggtgaagacaatattgtggaacgttgcgctaaaatgcaccccaactatacagcagcttttagtgatgctgtagaaaaaatgtcagtcagtcctttatattcacgacagacaagccctgatatgaagaaaaaactggaagaatataaagctaaaaaagcactagagaaaaaaaggaaaactaacgttatttttgatccgagagaacggaatgagtggaagtatatttatgattcctgcagaggaaatttatatcggtttaggtatttaaatcaggaagaaacagcttctgtattcctttcaagaaaagggcatcctatattaggtgaaatattatcgcggaatggcgaagctgatttggcattttacagtagcagaattaagaatgagtatgacattgaaaatctaccagggcataaggatatttggaagattttgtctgttacaaatatttctaaaaataaaaatggggatagcgaagtgacaattaattatcttgagtttagtaacttgaccaaagattttaaaaaaagagaaaaaaccaaaacaattgtcattaagagaaaatgggatttctataatgaacttatggatttcttagtcgaaatgtaaagttgcatgggacgcattgttggagtactgtgtgaggaaagtgaatctatgtaaggtggtgtgtgtaatggattattatgatggactatcagaaaaggaaatacattatattgatgaagcaaggataatcggtagaacggaaggaaatagtaaaagattaagtgatttgatcacatagcctttaataataaattcttttaatactcgatttgcccaaatgcggaacatcgtagcctttttagaattaacacggtatccgacagcaataatggcatccagattgtaatagcttgtattgtaccgcttgccgtctgccgcagttgtttccattttggaaacaactgcttcttccttcaattcgccggatgtaaaaatatttttcaaatgttttgaaatagccgccttttgcacttcaaataattctgccatctttgcctgcgtcagccacaagttttcctgatataaaaggatttcaacccgaacttcaccattatcggttttataaaacaggatttcccttgtttcataaggagttagcccatattcttcgttcatatccattcccttcctttcctatcagaacatactataattaacgagccatttgagtttctttcaaaataataaatatcacttgcttttattactttttttgcacccaagtaatttctatatattatttgagttggctccaaatgaatataccagacatcaaacattatgcttaaaatataccataataaacaaaaaataactataccaacatttaagtaaatctttgcttccccactaacatttgatggaatagtactcaaaaaagataataacactgtaaaaaacactgcaatcacgaaaagaaaataagaaatctttttcttagagaaataggttcttcccatctcatcctttttatattttacatttcctaacaatttaggaacgataatttttataagagtaaaaattattacatatgtgaatgctctaatttcaatccatatatagtccacaaatcaaacctcctatcaacatactaaaaacaaacatacatacaataaaaccaagcatgcaactaataatccctgatatccatagcgcaggatgtatttttcgagtctttcgtgtgataatagaaatcacgattccaataaacgagaataatggtcccaaaaatataacatcaatataggtatactgctgctttcacgattgcctgcacctttctttccgtaccctgaaattaaagctttcttaacagctcgcttggcctttttctgtcgtccttgcctttattgatttctttatactcggtgttctcattccaaacttcatcttaatcgcctctgttgtttcaaaaaacgctcctgctgccaagtacatgatcaaattcatcaagaacatccgtcatcagtcccttatcaatccgacttttacactctgcaatcagcacagccgggattccataaaatgcttcagaatttcaaattcatggtgcaatccatccgtccatgccggacctactgtatgaataatatattttgcctttaggttatatgcaccagtgacagcaatatcacctcttgcaattttgccgatattcgctctttctgcgaggagcttttcttttcctgctgcctcatatattgctaagtccgtgccacttacacatatcggatttggattagcagtatttacgattacatctgcttttactcgtgtaatatcgttgcggacaatcttaaatggcattgtggcacctccttatccatgcctgtattactttaacagcttccttatctgcttatccgttgcctcgggatacatctcatgcatataatctacaatctgcttccatgaatcctgtggattatccttgtagcaggaagtcacataatcgtatccatagatatgctcaatagatgaatacactgcaacatcccatccatattcaatacctcttttattcactctctttttaaaatcgcagttgcacagatatgtctgcatcataagattcgttattgcaccatcaaatcccttttctccatccttaccaaatccagcttgttttttcaattcatttgaataaatctctgaatcagcattatcttccataaaattgaccattatctttttatgcttattaggcgcttttccatcatcatataatgcatcaaaatcatatccatcccggcgataattagcaaatacaggaagccacttttttgatataaatcctgccttcttatcaaagaattttccatagacgatatcatgccgccttgctataatagcccgccacatccatggatcaatctccggattatcactccaccagtactctggaacagttctttcttcaagtgaaaacccatctatttcattcttaaataatggtaaaaagccaaattcatttatatacttgattgcttcatctacagaatggatgcaatccgggttgtcccacttcatgccatgcataatccattcacctgattcgtttcccataatataccctctatatgaacactattacagtaatactactcccaacagcaagattataaacataatgatgtatccaattattaatgtcattatccagcatgtattgacaaaactcatattttatgttcctgcccctcgatttctttttgaatccatgtcataattacatctacaagataatcctgctgcacctgacttagttccttgcccggttgcattttatgccactttcggatgcactccctgcagcatgtagctgttgcatgctgagcgataaataccggatgacctttcattggtgtctgcttgccatcatttgctatatatgccggagcttctctctttgcaataaaatcctttgcatgttgtctgattgtgtccaatcctttttcatttatgtaatcaatatctttctgcttcagatggaaactgcttcggaacctggaattatccagccgctcaaataactgcctgtaccattcatccttagtcattaaaacttcaccactcgttccataaaaatcacctattattactatctatcaataataggattataccaccatttacccctattcaacaaacacaataccatagattttctcagacttaagatatttcccagactacagtacatgtattcatttttgacctccttttccctggactaaaaaaacgcccagactagatttttcgtaaatctaatctgagcgttttatatctctcaggtctgatttctcagacaagaaaaccaattttacagattttgacaccccttttcctatattacacaatatttgaaaataccgggtggaaatcattacctctcatttgggtggaaatttttaatttttagtggatgaaataatcatttttttaatgattttcgtttttctttatcttaacgcgataatcctggcttgtctgtgggtaaattatctcttatcgtaatatacttctgaccagttcaatatagttcaattttacagtttcataaaaaatattgtcagaaatcagtttcatagttgaatcaacataatcgtcagcataaaaatcttcttgtatgagttcttctgctacagccagcagatcaacatcctcccttgcggatggagttattttaatatccatttctgctctatgctttctaacatctgtaaagagcctcttgaaatcatcatctattgtaatataatttttcagtttaaagatatcatataagtgtctggaatttctcgttgcccttcctaccatataataatcacatacagcaaaaattttatctataattgttctggatagtgtctgtgtcttcattttaaatggttctaatccataatctctcaaaatctcagattcttctgtttcaagacaatcaaatattatactcgtaatttccttttcttctgttggataagaatatgacattaacgcggtctccagcttcacatatggccgcagaccctttttatcttctgagcaaaccgagtcatatacgaaatcatagtgattataatccttatcgctttcgatagacttccaattatcaatttctaagtctaagtcttcgctgattggttgtagtaactgatattttattttcttccttctggcttctcccaaatgctcttcaaatgtgatatcaatgtcctctgaaaaacggtctattacatgataagccttggaaagggatgttccacccttaaacaccacattgggatttctctgtaccagttcttttaatatcattgtcacatagtaatctttttcaacgatactttcatctatgcccgttctttctgataccgttacaataatatctctcaacaattctttatcatctttatgcaaatacatcgtccagcctcaattcgtaataatatttaaatattgcaatcggaaactctcttatataactatccacatcattttttgtgatgccatgtatctgcacaaattgagatactttgtcatgggccacatcatagctttcatccagatacatatccagattttttaataagtcaagtagctgcagtacataaacattttcatcatttaccggaaccactggtcttcttacaatgaatgttctctttccaattggaatttcacgtatttttgctgccatgttattgctaacaatctcaactttatttggaacctgtgttgaaattcccagctgattggcaaatgtattaccagaatagaaaccatctacttttccacctctggaaacatacttgtacctggcaaccatatctgcatttacgcctacatttgtttttaatcgtgatttcttaggcaaataataaatgccgttctcatatttttgtagttttccctcatcgcacagcttttttagctgctgatttactgcagattttgtaattccctcaatcactatatcagaaaagaatataggctctgcttccttataattatttttcaagaattcatataacataaacctcattcctttccctaaatttttgtaactataatggttacttttgttaataacattctattcctgtttttaaaatctgtcaatgttattttgattgctatggttagtatatccaaagcagaataaaatataaaaaagaactgtcacccttaggatttctcccaaagccaacagctcttaaattttcataagacctgatatctgattccctgcgctgatgatctgatttgtgttcgaagtgatgcctcgataataactaccaacctcataaaatacaggcaaaaattgtgctgtatttttcacttattttacatttgcctacatttcattcattgcgactgcaaaaagagaccataaaaagtgacctgaaatgatttcatagtaaccttctttcctcggcctgtcgatcaatggattaagaactccatatttcttaatactgtcctgtagttcaatcatctgactgtcaccgatcaccttgaatggatgattcgtaaaagttcttaaccgctccatttcaatttcaactactttttcatccgaatctctgatatccgtcttttgtagcacgaaatggtagttcttcgttttccataatcaaatcacacgctgtcccaccgatgatgacatattgattttcaaaaccttgaaatctttccttaaattttgtaaatccactgaccattactcatgcaaccttctttcctgcaattcatctactgcttcttcaattctttcatcatttgtatctttaaaagataaaacaagtgaaatatcatcagcactgttatcctctgaaaattgttttgggttgtatgcccataattcaagtctgacctgtttatccgggtctatcaattcatcagtcagcaaggctttatcataatctttctcactaattgcataggtaacaactcggcttggatttagcattgttttttcagaaagtgccgtttcccctgcaaagaccatattttctgtaacttgcgtcttatctatatatcctgtttttcgaacaggagtcgtcaaatatacttttgctttttcaaataattcatctcgcttatattttgactcaataaacttattaacaccgtcttttgctacaagaaacaaatctgtcgtttccaactgcttcactgctctggtcaaggtcattgctgtaaacggaagcacttttccggcttctgaagtatacaatcgttttttcttactgtacagataaaataaaaacaactgctgcgtggagtaaacaaacttaccagtcagcttttggggttctttttcatcagaaagcattgtcccaatgaaaggaagaaagacctgcttatcagtaataaacggtatattattttctataagactttttcttcgataatttgataccgttgtaagttcaaatacgactggcacattatcaatctgctgtatttttacaatttgttttttcaatgccggaagtgtgacaagttcttctgttggagcaagcattatacagcgtctgtttccaatatatgctgtatgaaaatcataactccctgcaatataaacaggcaaagaatcctgatgattccatgcttcatattttatagaaatcccgaatacgcttgtaagcatatttctcattctccttttaactcaatttgttttattttaacttagtcaatgttataagtcaagtttttgagttattttgaatttatatttcctttttccgtgacatgctaaagtcgctatcatcagaaataaaggcttagtgaatgacttattctaccatactttttcatttgagccgaaggtaatatcataaggtgtaagcagctcattgtaaacaatattttccatgatatgagtaggttcctgctgtctaaaattcaatcttgcatttctaagtcccacatctgaaaaatagtatttcagatttgctcccacatattttctacctttaatatcatatctgtcagctttagaaatcaaaaatgcctccacaagataatctatatggttggatatggtcttattgctgtaattgatgcctcgttcacttttaaacgtatttgatattttagttgggttagtaggagctcctatcgcagaagcaaggatatctactaaagtatcaatctcatcaacatttcgcagcttgtttcgttctacaacatctttaatataaacatttgtgaaaatgttttttagatactcagccttttggcgttccacagaaaactgtagcacctgtggtaaaccaccatatatcatatattcctcccaagcatcatcataatctccatcgaaagccgcatagaactctgcgaaggacaacggatatattcttatctcatctaggatttatttaatcaatatccattactattttatgtgtattttcacatttctatgcagttgataaccaattaactatcttttcatagaaaagcaggtagtctttgatacttgttacatacatgaccacctgctccaacgtgatgtaatgcgaagaacacttttttccgccgtaatgccggcgcagtcgatcagaacggcattcattcctttcgggccgtcgtcacaggttttgcaatcgacttacggtaaatgataagggaaatgaccgcggagatcacttccgtgatccaaaacgcattccagacgccaaccgctccgaaaaacctgctgagtaaaaacgcagccgggatgatgaccactacataccggcaaagggaaatcagtaaggagggagttcctttcccaagtccctccaatgctccggaagatgtaacagaaaccgccgagacgataaacccggccccgatgatgcgtaaggcggtttccccggcctgaatcgtcgcttttgtgtgggtaaacagccccatcaactgtccggggatcagcagacatattactgtcccaaacaccataataatgccactcatgcacaaaacgatctgataaatctggctgacccgtttgtgctcccccgcgccgtagttatagccaatcagggggcgcatcccctgcacaatgccattcgctggcagatagataaaggtctgcaatttgtaatagattcctaaaaccagaatatacacttcggaatatgccgtcaaaatcgcattgagcgccgaaatcaaaagagacggaagcgcaagattcagggttgcgggaatgccgatggagtatagctttattaccatctttttgccgggcagaatgtactgactgcggatgtgcacgcgaattggccgcacaagatagactacaaggtaaatcgcaagcgtcagagtctgcccgatgccggttgccagtgcagcgccttcgattcccatttccgggaataggccatagccaaaaatcagaacgggatctaagacaatgtttgtgatgcacccgcacatcaggcttatcatggtcgttttcatgtttcctactgcctggtacaatttctcaaacgccatgctgacggtaacaatgagtgtaaaggcgaatgcaacgacagaatagcggacgccaagttcaatgaccgcttcggatgaagtgaacatccgcaggaaaaccggcatgatcgtaatacagcagactgtcataacaacgccatgaatcacggcaagcacaagtccctgcgtggcggcctgatccgctttttcatgatccccagcgcccaaatgaaaggcgattacggcgttgattccaacgccaaatccaattccaacagcattgataaaattttgaaccgggtaaaccagtgataacgccgtcatagcttcctcgctaatctgtgcgacgaaaaagctgtcgataatgttgtatagagaattaaccagcatggataaaaccataggcagggtcatggataaaatcagcggtaatatcggtttctctttcatgaaagtgtcgttcataattcctccttcgcaaaacacgttatgagatatttttgcggcgatgccatgccatcatcacaagcgcaacgaacaaagtggcggtttccgcaaccggaaatgcaagccagattccatccagctggaacaatttgtccagacaccacagggcaggcacaaggaaaagcatttgcctgcataattggattgccatgctggaccctactttttctgtggtctgaaaataggtggaaatcatcgtagaaaggccgcaaaacagatagcttgccgccatgatccgcatggcggagattccaaaggagcgcatggcttccgacgccgtaaacaatcccagaatctgcgccggaaagaggaggacagccaacgtccccagtatcatcatgccggtgaccaaaacagttccatatcggaaagctgaatgcagccgttcgctgttgcctgcgccgtagttaaaccgcatgacaggcaaacagccttgaatcaagccgtttaccgtcataacaatcagctgctgcaccttaaaatatgcgccgaagaaagcgatcgccgtatcggaatacgccaccaaaaacagattgacaaaggtcaccacaaacgaactgagggcgttcatgataaaagatggcaggccaaaggcaaaaatacggtagatcatctgctttttcaaatgaaagcctttgattttcacctgcactttctgctttttgcccagcagtaaagcaaatgccaaaatcatggacagcagatagcctgcaacggtagctaccgcagcgccgcggattcccatagccgggaaaataccaatcccaaaaatcagaatggggtcgaacacgaagttaacgaccacgcccgcgatctggaaccacatgggagcgaccatgttcccggtggcctgtatcatcttctggatggcgatatgcaccatattgggaatttgcatgaaggagcacacactcatataggcgatgctcagctgataaatttcttcattattggtgaatgcccgaaaatagggtttcataatcagtaatgacataaggttgagcaaagcacctattccaaaagccagtaacaatccatgtgtgacagttgcatttgcctcatcctgctttttctgtccaagataccctgctatcagcacattcacgccgacaccgatccagatagacgctgcattcatcaatgttgtaatcgggaatgacagagaaacagcggtcaatgcattctcactcaaccgcgccacaaacgcgctgtctatcaggttataggaatattgcaggaacatggaaatcagcggcggtatcgacatttgccagatgagctttccaacaggagcgaccgccattttattattggtctgcatactttccctcctctccacaaagtgtctggcagcttccatcctccgttctgccagattttccaggatgcagacaacaaaaaagccacacggctatcacaagatagctgtgtggcaaaaagatgaccgaatccggaaaagtccactcaaattttacgctcaatattatagcattctttcaggagactttcaagcattaatcattacggaattccagctctacaaacagctttacattgacatcagcaacatatgcatggtatggtacaaataataaggtagagaggcaactatcacgaagagcagtccttcatctctattgattcaaagaacacaggaaagggaagagtaattttaactatgaaaaagagtctgaggatgacagagggaagtatctcccaaaagatcattttttttgcaattccattgtttctgggaaatctgttccagcaattgtataatactgctgattccctgatcgtaggaaattttctaggaagtaatgcactggcggcagtcagttcatctggaaatctgatttttctgatggtaggttttattaacggcattgccatgggtgcaggtgttgttattgcacgatattacggagcaaaaaaaagagactgcctgcaaaaggcaatccatacaacggttgcatttggacttgtggccggtgctgtgctgacagttttgggaatgcttctggcaccaaagatcctggtattgatgggaactcctgcggacgtgctcccggaatctattgtgtatttccgtacatattttgcagggtctatgggtgttgtcatgtacaatatctttgttggagttctgcagtcggtcggtgatggacgccatccattgatatatctgattatttcttcctgtgtcaatgtcgttctggatattttctttatcgcaggtcttgacatgggagtcggatcagcagcacttgcaaccgcaatttcacagtttgtcagtgcactgctctgtatggttcatctgctgcgtgtggaagaagaataccgtctggaattgcgagagattcgttttgacagttctatgctgaagcagatcatccagaatggtgtaccatccggttttcagaattcagtgatcgcgatcgcgaacgtctttgtacagtcaaatataaatgcatttggaaaaatggcgatggcaggatgtggttcctactccaagatagagggattcgcctttttgccggtgacctgttttacaatggctctaacaacctttgtcagtcagaatctgggtgcaaaacagtatgaccgggcgaaaaagggagcaagatttggagttctctgctcgattactattgcagagttgatcggtattatcatatatgtggcagcaccggtactgatcacagcgtttaacagagatcctgatgttgtacattatggagtcatgcagtccagaacaattgcgttattttattgtctgctggcgttttctcattgcatcgcagcaatacttcgtggatcaggtaacgcatccgttccgatgatcgttatgctctgtgactggtgtttgtttcgcgtaagctacattactgtggcagttcgtattctcccggatatacgagtgattttctgggcatacccattgacttggggtatcagctccgtgatttttctgtatctgttcttacgtggaaaatgggtttacggattcgagaaatcctaatcgctactgtcttcggtgtcctgatataacctcgtaaaatcctttcggccttggtctgacaattaatggatttagtattccatatttactgattcagccatacatcatttttgctcatactattttctcagtattatttttcaaactctggtttccagtttgcaaactgtacaagctgttcatccgtgcggtgataatatctttcattcttgtccagctttgcaatctgttccatttcttcatctgttaatgcaaaatcaaagatatccatattgtccttaatgtgttctgcatttttacttccaggaattacaataaatcccatctgagtatgccaacggagaataacctgtgcaggtgtttttccatattttttgccaagtcctgcaaataccaactcattcattaatgctgtatctccatgtcccagcagataccagctcataagcttaattccatatttgtctaaagttacacgaagttctttctgtgtgaaatatggatgtgcttccacctgaataaactgaggtacaatttcccactttgtttccaactcttccatatgttttccttcaaaattcgagataccaatggattttgctttgccctctctatacgctttttcaagcattctgtatccggcaagccagttgcctgcaggctggtgtatataaagtaaatccacataatcaacaccaagtctttctagagtttcttctacagcattctcattttcatattcactagcccatatttttgttgatagaaatatattttttctgtcaattccactatccttgattgctcttccaactgcacgctcatttacataagcatttgctgtatcaattagggaatatcccatttttaatgcctctaatgtacttgtgtaggcatcctctggtgataacataaaagtgcctagtccaagcattggacattccaaattgttattcaacttcatattttccatctttttagtcctcctgaaatttttctttatcaagcatttttattacttttgccggatttccaactgctactgcataatccggtacatcctttgtcactacagatccagctcccacaattgcgtgtcttccgatacatactcccggaagtatcgtagctccagctcctacccaggcatattctcttatcagaacaggcttacaagtcagagtacacaaatcatatggatcatgattattggaaataatatttttgtctgacgttgcccttctgtactttcttttattgacgcagttcttacatcaacacgtatttccttctatatctgtatttccgagtttaccgtattccatagtgctctccttatcttaatccagcgtactctttctccgataccgcctcacaccactcattggaacaatccactcccggcacctcaattgccagatgggaaaaccattcatccggtgctgcgccatgccagtgtttcacttctgccggaaaaatactgtgcaaaaccatcatttggtgcaccgattggaaatgccatctcttttgcatgtgcccgcattgcttcctcttcgtatggcaaatctccttcgcctgtttcccacacttcctttgcaagattgaaaacagcccatgcttttggccatcctgcatagaatgcaacatgtgtgatcacagcagcaatctctttttgtgtcacaccatgattttttgcattttgaagatgatattttaaagaagaatccgtaattccggaagccatcagcgcaaccacggtgataatacttcttgtttttacgtcgatatcctggttattccagttttcgccgaaaagtacatcatcgttaaaatgtgcaaattccggtgcgaattcaccaagtgcatttcttcctgctgtctgtactattttttccatattctgtatacctccataacgctgttatttataaagagtttacccattcactgatttcctgtttcgttccacaatttagcagtctgccttctgtaataaccgcatccggtgcagatgactgcaattctttcacagtgtttccaaatccacttcctccggatgttgcaaaaagcacaatctttttaccactgaaatcgtaagcttctaaaaatgtattgatgattgtcggcgcaacataccaccagattgggaatcccagaaggatctcgtcataagaactcatatccatctcttttttcataatcgccggtctatattttttatcactcatttccacactgcttcttgattttttattcatccagtcaagatcaggctttgtatatggaacttttggctcaatctcaaacaaatccgcttttacttcctctgcgatcatctctgctactttttttgttgttccgcttgcactgaaaaatgccactaattttttactcataataaaaagcccctttctttgcgtatttttcacaaaaaatagatgtataagatttacattcatcttacacatctattttaagctctatcacttcattatgtctaatgcttatattgaattttgttttatgcctgaaaagcattaatctcctcgatcattttacggactgccaaagaatatgggatattacgtcgccaggcaatcaccgtactggtcgtgatttcaggagaaattcttcgctgtacaagaatatcctcccgccaatactttgcagcaccttcgattgatattggatagcccagtccatttgctgccataactccggcattcgttccaagattacttgtaaaagcaatctgcagtttcgaaaagtcttttccaaaccaattggcaagttcactttgaacactcactctttcgggcagtatcaatggttttcctatgagatcttcttttttaataaactctttttctgccagtggatcatccggccgcattccaacacaccagtgatcgcaatctgtgattctgatataatccatcccttcggtgtccaccggctccatgaataatgcaatatctacaagtcctttgttcatcatctcatacactgcatctgctgttgcagtatgcaatacaatctgaaccagcgggtatttttctttatatgttttacatatcttcgccaatgtctccaccgctgcaaattcaccgcatccaatggttatatttccctctacaacatcttcttttcctttcagttcctcaagtgttttttcctcaagattaaggatctccagggcacgcctttttaataaaattccctcttcagtaagcgaaattttcttcccgcttcgaataaataatgttactccaagctcctcttcaaatgccgccatttgtctggatagcgttggctgggtaatatgcaattgttctgctgcttttgtaaagctctgttcttttgccaccgtcagaaaatagcgcaatagtcttaattccatatttatatacacctcttttatgagaaagaataatattttcagtagaataggattgattatcatccctccaaatttcgatttctcagtttcaaaaactaaaagttgttgtattctatactgatacatcaatagaattacgaactagcctattaccatttttgacaagtgttgcttccactgattcttttgtgacattatcaagaatacttgtatcaaatttttgtcccggtttccaatttggattagctgctttcactgctgcatacatagcggatctatactgtccttcatattgttctaaagtccatgtaccacttaaacgtttatctttattcacacttaattgataatctttgaaaatatctgaacgcttagttgtatcaccatttgaaacaccattttcttgaataaattctttctttacattatcaaacattttttgacgatattcctcagatacattcgtgagtttctgccacgatgtacctttgccagtaacatccattcctgccactccatttgcattcagtaaatccccatcggaatcaaattgtttcatcaaattattaacaatagtatcccctccgccaaatatttcatatatcattttttcttttggagacatcatagcttcgttctgaattactccttctaaccagcctttttctttcaaagctttatattgtttgctattagtattgacaccactataggcattacctaatctactaatattcatcgacatacaaaaaccttccttgtaaataaactaaaactccgtttaaaaccaaatcattattatatatattatatcgtcatatctcctacaagaataaataaggcagttccacaaatccaaagatgatggtctatcagagagactgttatatatcttcaagtttaaaaagataattttcaataatttttcaaaaatcagaatcgacaattcatgacaaatcaaccctgaatctgggaacgtttctcatagaaaagaactacaaaaaataagaaaataaaaacgaaaaaccattgtctgtagtataagtatttgttattatgaagtaaatagaggatattttacaaagtaaagcttaatctagagaatctgccagtggaatgcctctgtagataccaaggtatacaaaaggagaatgaaaaaatgaaaaaagaagacatgtcctgtatcgactgcgcagtaaaaaactgtaacaaaatggataaaacctatccggatttctgtctgacaacacacatggatgaagaagttctaaatgaagctatggaatgctacaatgaagacgagaaccgcaaagtaacaatcgctgcagctgaagtagagtatgagaattactgcaaacatacccgtgtcgaagaaatcatggattttgcaaagaagattaatgcgaaaaagatcgggatcgcaacatgtgtcggattgttgaaagaaagccgtatcctggcagatatcctgcgcagacatggctttgaggtgtatggtgtcgcctgtaaagccggaacacagaagaagacatctgtcggcatcccggaatgctgcgaaggtgtcggtgtgaatatgtgtaatccgatcctgcaggcaaagcttctgaacaaggcgaaaacggacctgaatgttgtggtcggactttgtgtggggcatgacagtctgttttacaaatattccgaagcactgactacgacagcagtgacgaaagaccgtgtattggggcataatccggtggcggcgctttatactgcggatagttattattcgaagttgaagaagagtgaagaagagtaatatttctaatttgggcgtttaaagatacataaagatatcccattcaagcatttctctttttatccaacgaaaaaaagaacacacaacactctgtatgttctctttctgtatgtgaagtccaatattatactttgaagtagctatccaatcctttgaactcttccgctttgatattcctggtctttatcgttatcgttcgacatattactccttccatttcatccataatagaatactattttcttctataaatcagaactgagtaatatgtggaagattttggacatattagcgtgattttttccagataaaaccagacaaccaacacatatcaatattttttactatttgtaccaaggacagattatggggatattttcctatattctgtaccttttctgtatgttattactacattgctcttttccgctgtcgtaatgcttccatatctgtagagtatctgctggctttttcctgatcatgttcctttccacggcagttctcaaatatcttcatataaatttcatccaccacccctacgatttctttcttgcatctcacacatgtaatctcaacactgcaatttcccgccaccttaaacaactgctttccgcaggacgggcagctcacatatctcatcttaactctctcagtcatcatcaaagtcctcctgacattgtacaatttacgtaccattcaacggataagggaaatgaaaaccattgatgattatattctctggataaatgagttccgatgtgccgaagtccgcaccattcatcctgtgaccttcttgctgatcttttcgactggtataacaccattaaaaagctatctctcctccataaaccacatattgttgtcctcatagaaaagatggctctcttttccgtcaacaatacaggtataacgtattccggctccgcctgctttcaggcttgccgctcttcttacatctgttactttctgaatctcatatacatggccatccttccagataaagctccttggtagaagccttccgtcatttgtaaattcagccatgacatttacatataccttgctgctttccataatagttcaatccctcctgtctatccaaagtacccatgcggatgtaccatatgatcagactttgcatcacatgctgacagtattctgtcacggtacataagccctctctggacactgtaaaatccaaatcttttgcggataatatcaaccgtctcatccattttcatctgtttttctcttgcctgaggatccatgaacatgtccagctgctcccagaaataatctgtcacaagatccgttccacgtattcctatgctccgcagtggcttttgaaagaactctggccggctgcttttcagttccttatcatctgccggcagtctgtagttgtctttgtatagcctgtatccagcctctgcaatctctttggtgatattgctcgcattctgtaactttacctgttttgaaaaatggaacagttctttgtcacggacactgatctcaacagtccggcaccggaaaccattctcccggagtcttgccgctacactttctgccagaatgtataacacaatcttgacatcttcatctgtttccatatccctgggcgttgttgtactgttgcctacggacttgaccggagctgatgtgttttccagctttaccggagattcatcatatccattagcaaaagcccacagaatacttcccatcttgccaagttttctgactagcagggtttcatcagattttgccagatctccgatagtccggattcccatgctatataactttttattcgttgcatttcccacatataacagatcagaaactggaagacaccaggcttttctctgaaactcatcctcatacatagtagtaatggcatccggtttcttgtaatccgaaccaagttttgcaaaaatcttgttgaacgacacacccacgctcaccgtaatgccaagttcttttttcatcctgctgctacaggctttccccgaagctccggatgatgcagaagctctactgatacataaaaacagttacaatcactatgcagtattgtccggttcactgaatcaccttctttcctgctgccggatgatatgccatccgtctacatggcataatataatactttttatattgctattcaacagtaatttattgcatattatcaatatagttgatattgtgtattgatttttagggattcttatgctaatcttgatatatcccaatagggagatcatacctgatatgattacttagaaaggcataatactatgaaagatttaggaaagaccattgctaaatacagaaaagaacataagctgaaccagagccagcttgcaaaagaactggaaaactatgacatctatgtaaagcagaattcaatcagcgcctgggagcttggcacagcaacaccaaatgccagacaatttctcgccttatgtgaaattcttgaaatatacgatatctatacggattttattggtcaaagtccccttaacccattccgaaacctgaatgaaacgggaatgaacaaggtgcttgaatatatcagagatctggaaagcaccggcaactataaaccggcagatatcattcctattcatgtgatcagggaaagaaaagtattttacaatacagtttctgccggtaccggctctttcctcgacagcgatgaatatgagatgatttcctctcctgatattccagaagccgcaaccttcggtgtatatgtagatggtgacagtatggagcctagatatcataataaggatctcatctggattgaacagacagcatgccttgatgatggcgaaataggtattttctatcttgatggaaacgcatatgtgaagaaatttcagaataacagactcggaatctacctcatatcactgaataaaaaatatgatccgattccggttacagagaacagttccttcaaaatattcggccgtgttctttcataagtcctttttttgggacacttaaaactgtaggattattatagcggaacagacctgaacaattctgaatttggaggtgcatatatatgaatactgatatggatatagacataaacaccatgacagacacaattacttgcagacttgttgaagcgagggcagatcttggcattacccagaaagaacttgcatcagcaaccggcatcagcctgaaaactattgccaatatcgagtcaaaacagcatattccttctctgctatacgccatgagaattgcagatttttttcacaaaccggtaacaagcctgttctgctatcatcctggtgttcagcagactccctctaaaggagatgatctgaatgaataataaaaaaatgttagatttccagacaatcgctgttgattttgatggcactctctgctacagcaaatggccggagcttggtcagccaaaccaggcactgatcgaatatctccaggaatggggctatgcctttgtgcttattctggcattcatttttagttagtgcgggttatttgcctaatacagtttttctcataataaaaatctgttggttaaactttttcaaattttgctacttcatccgataaatcttccgaaaggttcttattttcgtccgcctgcactgtaattgctgaaattgctgttacaagttgtgatatctcttgtgctacgtttgtaacaccttttgcagattcttcaatcgctatagaaatgttattgataccttcattcatatcattcattgtacctaagctatcttttgacttaactgcaaactcgttaaatgtattacttgcctgttcagaatcagcatcataatttccaataatttttacaaagttgtcataatcaagtgctaccttttcatctacaaaacgaatcatttctgttgcatttccagacagattgtttactgcctcaataacttttccactgatttcctgaatattgtttgctgtctcacgtgaactatctgcaagctgtctgatttcatctgcaacaacggcaaagcccctgcctgcttcccctgctcttgctgcttcaatcgatgcattaagtgctagaagatttgtctgtgctgcgatatttaagatattttctgtaagttttgcaatttcatttacagacttagatgcttctactgcctccgcgacatccttttgaatgccatcaaatgtttctactgttttttcttttgatgcaatcgcttctttatagctattttctgcagtaagcttcacttcatgcatcttcattgcagagttcttagcatcctcattcatgccttccattttctttagcagattattacatccttgggctaaatcatatagagaagcagatacctcttccatggatgctgcaagttcttccgatgttgcactcacattggatgcactcatatttgaagattccgcctcattttgtacaagataggaagattctttcatatcttttgatacactctgaatctttaccataagattttgtaatgtttcaataaaatggttgacaccatttgcaagctgaccaatttcatcactggtttcatcaaatactcttaacgtaagattaccctgtcctgattctatacctaaaatgatatcatccaaatcattctttgctctttttgctggacgaacaatggacttacgaaagaagtacgattacaataatatcagctaccacaagtgcaagatcaaaaatgatgcttccatttattctgtagttgatatgtctgatggcttctgccacttctccttttgctgtttcaaaaaccgcggtatcattattttccactgcttcttcatattgttcaaactgttctataagcacatcattctttcctcgaatagcttgtaatgccattaaattcaaggctgtaatcaaaactgcaaaaaagcctacagacactaacattgttactaacttttttcccaagttctttctctttttcatgtttatttttcttctttctgcgaaaagcaccaatgcgttatgttttggaattttttaccatcattctaccccaccccacaaaattttgtcaatactttattctcttgatagaaaattttaatctttactctgatgaggatggcgtgaaacacatccgtatcaaagccagacctaataaatggcatgagaatgactgccctttctgtcacaagtcatgtcctgcttatgacaaacattccagcagaccaaccacttggaggggactggactgggggtggtattctggtcgaagttgaataccagacgcatcgtatcatctgccttgaacatggggttatatgttgccgaagttccatgggcatatccaggtagtagatttaccaaggatttcgaccttaccgttgcatggtttgcatcctatcttccaagaagtaccacatcatacttcatgagagtggactgggaaactgtaggccgctgtgtcaatcgtgctcttcacgatttagaaccggagcactcaagaagacttgatagtctggttaatatcggcattgacgaaaccagttacaaaaagggtcacaagtacattacagtaatcgttaatcacgataccaacacagtggtatgggcatcggaagaccatggcaaatccgttcttgaaaagttttataaacagcttactccagagcagctatccagcatcaaggttgttacaggtgatggtgccaaatggatcacagagtgtgtaaatgaatacactcctgactgcgcccattgtgttgattcctttcacgtaatcgagtgggctatgacagctctcgatgaagtcagaaaagatatctggcatgatgcctacagcgaatataagcaggtcaaaaaagataatccatgtagcaagggtcgtcctaaaaaggatgatcctgaacttgctattgtgaaagcagctaaagctaaagcagatgagataaaaggctctgcatacatgataaaggttctctgtttcctttttgataccaaatatcatatgcattatataatatctttctaaactcttccatgtttctattattgatagtattaaaatctcctatgagaatatactcttcgttagaatgtttctgtaaaaatgaatacaattcattccaaaattgttcatcatatttgggtggaattggttatctaattaactacattattttctgtctaaaatatccataaattcgtcacctgtaattgtttccttctcatacaggtacatagccagttcgtccagtttttccctgttttcagcaaggatttttcttgctttttcatgctctgcttttacgagctgcacgactttttcatcaatttccttctgggtatctgcggaacaggaaagagacgtatcgccgccaagatactggttggtcacgttttccattgccaccatgtcgaattcatctgtcatgccgtagcgggtgatcatcgctcttgcaatttttgttgcctgttcgatatcattggaggctccggtcgtgatctcaccaaatacgatctcctctgccgcacgtccgcctgtaaatgtagcaatcttattctcaagttcttttttcgtcatcagatatttatcaccctgctcaacctgcatagtgtagccgagtgcacctgaggtacgcgggatgatcgtaatcttctggaccggtgctgaatgactctgcaatgcagctaccagagcgtgtcctatctcatgatatgcaacaaccttcttctcctgatctgaaagaaccgcattcttcttctgatatcctgcaataaccacttctatactttcttcgagatcagattcatttacaacggtccttccactacggacagcacgtaatgctgcttcatttataatattggcaagctccgcaccggatgcaccggatgccatacgtgcaatcgtatgcaggtcaacatcatcagatgcttttatcttctttgcatgaacctttaaaattgcttcacggcctgcaagatccggcagttcaaccggcacacgcctgtcaaaacgtcccggacgtgtaagtgccggatctaacgactccggacggttcgttgcagcaagaatgatgacaccattatttccttcaaatccatccatctctgtaagaagctggtttaaggtctgctccctctcatcatttccgcccatttgtccgtcacgctttttaccaatggcatcaatttcatcaataaacacgatacatggtgccttttcctttgcctgtctgaaaagatctcgaaccttggaagctcccataccgacaaacatctcaacgaattctgaaccggacattgagaaaaatggtacatttgattcacccgccactgcttttgcaagcattgttttgccggttcccggaggtcctacaaggaggacaccttttggcatagacgcacctacatcggtatacttcttcggattgtgaagataatcaacgatctctgaaaggttttctttcgcctcatcttctcctgcaacgtctgaaaaacggattccctcactggattgcacataaatcttcgcattgctttttcccattccaaaagccatcgaattttttcctccggcatgctccatcagtttcttcgccatataatttcccagtgcgataaaaaggatcaatggcaaaatcccggtcagcaggaagctgatgatcggtgacatctgcttatcgatatcttttgcgaatactgctccacattcatatagcctgtccgtcaggttcggatcgttcatcagacctgttttataaatatttttttgatctttatctgtaaagatgatctgattgtccttaacttctacttcaccgatattcttcttctcgatcatgctcataaaagttccataatccgtttcctttacctgatgcttcataaggattggtgtgacaaccagattaaatactatcagcactattaacacaatcccataataatatgccagtggttttttcggtgttttaacttctttcatgttctttcctcctgttgttctgcgttatgctttctccgtgcattttcgtattatttattctgccatctgacttcgcccttggacagaagcggataacctcctgcaacaaatgccattccgatcaaagcataatggctttttatcttcccggcaaaccggaaatcaaattcataatttcttggtgttatcgtgatctgttccccataggaaaattcataatcaagcgttctgcccatataaaaatcttttgttttgtaagttgctgctgtacacatatcgaacacctcttctttctgctataatagtcctgcaaacaatctcataaacaactgtccgatccgtaaatatgcactccgtcctgtgcggtacttttcggtcacttccctgcattcattcattgttgctccaagatcatctcttatatccaaaactgtctgactaccattatactgcattataaggcagataagcaatctgtctttttgtcataaaaaaccttatctaaatgacattgaatgatttattttctatctaaaattttattaaaccgactaaagactccatagtttgtgtgtttgacttactgtttatatctatcttctcctaaatatttttctagtcattgcaatataaaattgcttatacagtctctcccttaagagtcctggtattctggataatatacagagcgaccgatatgaccatcatgatagcgcacaaaccaatcaacagatctgataccatcggtgtaatgtggaaccatataatatgcaccgctgcagttccatataataaaaaggttactatctttccatgccagtctgcaccatgtacttttcctgtctttcgtatcacaagacatccactgactaccatatacagctccttacctgccattattacgattaaaagaagcacatgcggaaaacgagtaaacagacagattaacatcgctgcctgtgtcagcttatcagccaccggatcaagtatttttcctaaattactaatcctatggaatcttcttgcgatatatccatcagcaagatccgtaagaccagacagcaataagatttcaccagctaacagaggatttttctttacacaataactccatataattaccggaatcagacaaagccgaaaaaaagaaagaagattaggaaccgtaataattctattcaaattttcttcctgattcacttcactctgcatgtacggtcacatcactttccttttttttagacataaaccaataaaatataacacaaaatactaaagcaaacacaacaccaaaaacattttgaatcactctaagactaaccgctccttgtagtccataagtctctgtagcaatggctaaagcaccaaatgtgttaaatactgcctgccagccatattgtgctgaaaatcctacaccgattccaccaataattcctatatatgcatagattgacgaaggaagcagaaaatataatactgtaaaacatataacacctgcaatatttccgacaatccttttacggactctgtagtgcatatcttccataaatggcaaaatcgcggacatggccgcaataccagcccacattgcacgtggcatattacaaagttctgcaatgcaaaggacaatcggtacgcataaaatctgacatatctgccattttgttctggaagaagtgatatcaaattcttgtatcagatctttcagatttcttttataagttctgtttttatgatttcgataaaatacgaagcaggtaagtgctgcacctaaagccattccgactaatcgcatctgatagctttttcccgtaacatcataaccatatagcagcagatacccaagaaccaatgtagattgattaaacatgaatggattatggcatccgaacagaatcaacacagccagtgccgcgatatttaacagcattcccaataccggtgaaaactgatttgctaaatgcggacatacagtcataattacaaagaacaaagccaaaagcatcgtagattgtccggtgtggatccccagatccgcattccgaaataccataaggcataataaaactactacacccacaatgctgttctcatttccaaataagatactgaaaatagtaacaaataaaaaacaaaatgccattgtaacagctatctttaccaaatataccagtatatgatatgatttttctttcactgtttcactctttttcaacagatttttagaacctgcctgatttaactgcaattcctgataaaatgtcatgtaattcctcctctatctgtttttcttaaacttatatggcctcatctttctgtattggaagctctacaacaaatctgcatccaccatattcacggttttctgctttgattgttcctccggcactatctacaatccgttttacaagtgcaagacctaggccatttccttctgctttatgagatccatctacctgatagaacttgtcaaatattctggattttacatcatcctctattcctggtccttcatcttccagaatgaacttaacagaatcctgttcttgtttcagaaacatcgtaattgtcccctttgaagggctgaacttaatcgcattatccaaaagatttatccagatatgcataaaaagtccttcattcccagtatatttaacttcctccaattctacctgaaaaccaatttctttttctgtccattttgtttccagggaaagaaatgcctgacggatctgttcatccagacgatattctgtttttttcattggtatattctgattctctaacttggataacagcaaaatattaccaaccaatccggaaagtctttgggtgttaaataagattttttctacatattcctcttgatccggagacagttcttctccctgaagcagcattgtatatccttcaatggcattaatcggggtcttaaactcatgagaaacattagatacaaaatccatctgcagcacctctgttgcacgaagttcttttgtcataacgttaaaactttgataagattctccaacttctgctatacggctgttcgtttccaaatgctgttcaaaatctccccgagaaacttccttcattgctttactaagcctagtaattggttctagtaactttgcattaataaaggaagtgatcagccctgcaatcaatgtattgaaaatcaaaagccagccaagcacaggtatgctgcccggcagattaaaaaaatgattcaaaaaagcaaataataaagcagatatgactgttgaaaatacaagtgccagccagattgcaccagtcagacaggatcggatccgcaatcctttttctttcttttgttccattattttttcaccaccttgtatccaattccacgcattgttacgatttcaaaatcagggttatctttaaaacgctctctgattcttcctatatgtacctctatcgtatgtgggtctgcctccgtctcgtatccccatacttcatccatcaactgttgttttgtaaatgttctgcctggcgaagctgcaagcttatataaaagcagaaattcttttttaggcaaaacaagactttccttatcagttgtaaccgtcattgcatcataatcaaactctgttgaaccgatcacaattttgtgttcattcagtatctgtgcacggcgaagcagtgctccgactcttaaaaccatttcattcacatttaccggttttaccatataatcgtcacttcccgaaagaaatccctggcgcatatcatcaaaggaacctttcgcagtgatcataagcactggtatctgatatcctgctgaacgaagttctgacaccagttcatagccatccataaccggcatcataatatcagaaatgatcagatcaatatattccttatccaatacttctaatgcctgtgctccatccgatgcacttttgacttgatatccattcttctcaagcactttttggaatagctggcttaattctttatcatcttctacaatcaatatttggaacacgttttccttcctccttattaaaacagataccttgcccatccaagcagatgctgtaccaaaaatatttttctctgacgcttctttgtcaattcaattggctctacatgatacggatcacgataggttccatcttccaatacctgtcgggacactctttcatattccaccatgctctcttccaactgtttattaatatctttactgcgaattacaagcatcagttccgtatccagatatgcacttctcatgtccatattaaaggaaccgattacagacagatcatcgtcaatcagaatactttttccgtggtatgaataaccgccttcatattcccagatattaattcctgtacttaagattctatttctgtttttcgcataatcggcagccccaaatggattcccattattcgcaactgaatttgtcatgatagaaaaatctgaaacgttctctgcaatctcctcccatgtattatacatcatatcattacagataatatatggcgtgtggatcttcacacgattttttgcatttttcatcaattctcccaactgataccacactaccggttctttggaacctgtgtgaataggatttgacactaatgcaatcttttctgtctcaaaagtttcgtccgtataatcggtatcgcagattctttccttattctcttcaaaatatttctgatagccgttctgcagctctaaaactgcgttctttacagattttctatttgccagttttttattgttatgaaaataaccactgtcttcctgatcccatatagtttcaaaataatctaacaactggttaactgaattttctttctcaggttcattgcaaacaaccaacacgtctctgtcatagttcttatgtcccggaaaatcccccaggaaataattatatgtatttcttccgccaagaatatatgtcttaccatctgcaatcaaatatttatcatgcattctacccatcattttccatggtttcaacgggttggctttattatacagtttaatttcaacattctcatgagaagataatccatagaaatacggatttccttccatatcaatccagctctccattccatctactaacagacgaatatgcacacctctgtctgccgcatcatgcagtgctcctaagattaattttccactttcatcggatttaaatgcaaaagtagaaagaataatttcctcttttgcattctggatcaaacgcactctttgtaaaagcgcttctggattcttttctatgatcactgcacgttccgtattttcactgcattcgttccacgaaccattttttgtttcttttttggttgtattggacacttccggctgctttttatatgcaatacagattccgagtaattcataaaaagccacacataataaaattgccagtataacaagaaggattttacatatcttatgctttttcattgtatatcacctgattccttttcatttcatacttatacaatacaaagtcaatctcaatttaacctcaacaaaatttatttttcataaaaaaaatatgacaggcttctttttaaagaaacagtcatatttttattctaatatatgaaggagcttttcttactccgttgtattaatcactattttatttcttccataagctgtcggatttttctcaatgtacaccgtgtaactgccaggtcatcttcttgtatattcgatatgattttttcataagcttctatcattttttctttctgacaattgcttaattcaattgccttgttcgtcaaaacaaggtacgttctttcttttttttcatctaatttccagataatatatcctttattttcaagactttttaccatcttagatgtttctggaatcgataatttcatgtattctgccacttctgaaagatatactccttcatgacagtctgatttttcaacacattcctttatactataaaggaacaaataatctgttctttcgacaaattcaaatatgctttcaacattgatgctctttaaaaaaaactcctctgcactggttcctgctcccatattatcgttcctctctttctatatattcttttttgctgactagactcttatatgccgggcgaatgatcttatctgtagttatcaattcttccaggcgatgtgcactccaaccagcaattcttgctatcgcaaataatggcgtgtacaattctcttggaatattcaacatgtcatacacaaaaccactatagaaatctatattaggacttactcctttgaatatctgacgctgctttgcaatcaacttaggtgcaatcttctcaatattgttataaagggtcatatctttctcacgtcctttatcccttgcgagttgttctacaaagcctttgaacaccctttctctcggatcggaaatagaatatacagcatgtcccattccataaataagtcctttctgatcaaacgcctctttcttcaaaatcttactcagatatgatgcaatttcctcttcgtcttcataatctttcacatgacttttaatatcatccatcatattcattaccatcagatttgcaccgccatgtttttttccttttaaggatgacattgctgctgaaataacagaataagtatctgaacctgaagatgttactacccgtgtagtgaatgtagaattgttaccaccaccatgttccatatgtaacaataatgctatatccagtactcttgcttccagttctgtgaattttgtatctggtcttaataggcgcaggaaattttcagcaatagataaatctttttcaggtctatgaatatacatactttcgtttttttcataatgacaataagcatggtatgcatatactgctaacataggaaatactgcgatcaactgcatactctgccttagcacattcggaatttcaagactttctttctccttatcgtaagagcccaatgtaagaatacttcgagtcatagaacccataatatctgatgtaggtgctttcataatgacatctctggtaaagttagtcggtagttccatacaatcagatagtcttccctgaaattccattaactgtgtatcagttggcaattctccgaataaaagaagatatgctccttcttcaaagacaaacctttttcctttacttcctgttactaaatcttttatattataaccacgataagataactcgccatcacatggactctttactccatcatgatattcaaaagcttttatattagaaatatttgtaagccccgtcaacacaccttggcctttttcatctcgtaagcctctttttacaccatactctgaatacagattcttactaatgctatcattttgttcacaaaaaattgcttgccgtttcatataattttccaaattgctcatttgaatcgctcctttcattctgttacgaacttacatactatactcagatattcttgtttccagagcattcagcattgtctgttcttattcttattcattagcaatacaatacaatggaaaactcaatttaacctcaacaaggtttgttttttcatccatgcaaaatcttctttgtacaacaaactgttacctatattcattttgacctccttttccctgaactaaaaaacgcccagactagattttttgtaaatctaatctgagcgatttatatctctcaggtctgatttctcagacaagaaaaccaattttacagattttgacaacccttttcctatattacataatacttgaaaataccgggtggaaatcattacctctcatttgggtggaaatttttaattttgggtggatgtcgatgattttttgaccatatttattgttttatatgttacttctctattagttctgcaaacttgaagttagcgatttctttttccggtattctctgtcccacggatttcctcatgataaaaataatctacgatcaccggatgcccctgcgggactcttccataaggcatttcattatccacaaaggcacaatcatacttcttagccattttctcagcttttacttcaagtgcttcaaagtagctgcggttatgcttgttatagatctcgtcgtaaagtggtacaagatcaggatattttccggcgatataatccataattgtctttttgaaaccgcctcgaagattgagattttcgagccagaacagatcgcactgattctttacccgctcaaagattgcttcaaaatccgtgataccggggaataccggggatacgaaacagactgtacggatacctgcctcatatacctgcttcatagcagcgatacggtgctcaatgctcgaagcagaatccatatcgttcttgaaattttcatctagtgtgttgatcgaccatgaaacggttacacgtccaagcttcttcaacagatcaatatcccgtaccacaagatccgactttgtgcagatcagaatatctgcgtcactgccgattagctgctccagaagttttctggtattcccgaattgctcctcctgtggattgtagccatctgtcacagaaccgatgaccacccgctgtccggcatatttcttcggatttttaatttccggccaatgcttcacatcaaggaaagtgccccattcctccttgtgcccggtaaagcgcttcataaaagaagcatagcaatacttgcaggcatgtgtacagcccacatagggattgaccgagtaaccgcctaccggcagactagacttagtcatgatgttctttgtttccacctcacgaatgaggattccattcattacttcttccatgatttctgtacctctaacactttattgaattcttccggcatttcctgaatcatattttcatcccctatgatagggacaaggtcttccttcataaacactggaatgccgagcttatgtgcctggtccgccagagaccatgcccattccgtctccgtatgaatcttcctgctctgagctccggtcatggtgccgacaacgatccaattgattccggaaaggtcaactatgccgggatcgtcgaataacggctcaaaggtaacatggtaatgttttgctctgacgtttttccgaagggcgtcgatacgccacagttctgctttcctcgtcaccgtaacgccaaaccatacgttttccagatcggtatcaaaatccagcaaatcaggtcgcttggtaaggaacaggaactgatgctgtggattttcacggatctttgcaaatacctcgtctctccattccggcttccatccagagagatcgctcatgccggtaagaagaaagttctgcggacttttcttttccatcatcttgagcttacccggaaagaattcaggggcagcgaagtcatcaatcatatgccagcgtttcacgttgttgcgggcatagcaatatgcacaccccactgtgcagccaatgacgatattcatgttctgaatctgatctttgatacaaatactcatgacttctgccactcctcaagattctttctgatgcggtcgaggcattcctcaaaccgggtaatttcttcctctgaaaaacctttgtagtaaatactgcccatctcatcagatacagaatcgtactcgccctttaaggcatgtgctttctcagtcagaaacaggagtgttttccttttgtccgttttagactgaacacggcttatcagcccttgattttccattctttccagcatcgtagtaagagatgttatcgctaatccgcatttagtcgagagtgacctgattgagataccatcctcctgccacagcacataaagaatacgtccctgggctccattaaacgcatcaatattcttttcactgagaatcttctcaaaaatccggtctccaagctgttttattttggtgacaagaaatcctccattcatttccatacaaaagctcctatatagtagtttattaaaaacatactatataggagctttattgtcaagagtttatatgtcttaataggtaaattccgtttttttcaattctccaaactggaagttatcgctttacttttgttgtatcttagccaaaatactttctattacaagtgttactgttataaaggctcctacaagggtatagtagtttaagccatacatcaatggcaaaagagaaataactaccgtaataatggaaaggacaaacaatgctttgagaacacctttcttcttcaatgaaaacaatgaaagtaagaagatggcaacagtaagtgtggctgtaataagtggagcaaaatttgcatagccaaacggtgtaaggctaaagtatgaaaatgtttcttttactctttctgttggagatgttgcaaaaatacaaactgctccaaagggtaataattctaacactattgttaaagctggcaaaaccgctaagcagactttcttcatgttgtatatctcctttacaaattccagtttgtgtaactgctagataaagtcataatttaatatctatatcgagattaagcaggaaatctaaaatgatctcctgctttttgtactaaacatatgaaaagttataattctgaagctaattcatgcatccaaaaagaggctgcctcatattcttttggttcggataataccggaacggtgaggatatcaattggtacataaagtattttagtcattttagcaaggatttcatcacgaggctttcttgcatctgcttcatactgtgcaattctgatatctgcagaatcttctggaaagccaagtgcgataccgagttctttttgggtgagatgatttttctgtcttaagtgttttaattttcttccaaatgtaatcatagtagtaattcctttctgtaagtttttttgattgtgcgaggtgtcaaatgataaatcattcggcacctctggttttataggggattattctccggtacttccgaaagcaccggtatctcttgcctctccaagatcaagaacaaagtcagcgattagaacaggagtgataaccagttgccctatacgggtatctttgcggagtatttgggattctgaactaacattactgatgatggcatgaatttctccacgatatccagaatcaataggcggaagttcgcagaccaacccttttgctgccatgctgcttctcggaaatacgtatccggcaaaaccatcagggatcataagtccaaagcctaaagggatacggacaatctctcccggctttaatgtgtagtcataaggcatatatacatcagccccggcatcgttttcatgaggacggaagggataatgatctttttttaacccaaagtcgatcaatttaattttcataaacagtttccctcctttctacgagcagaggataatctgcgctcattatttctaatggagaccattcttttgggataggaactccacaagacatagaaccttcctcgcaatttcctttttggcaaaatggaccggtcagcttcggtgaaaataacaccggatcgaattcatatagtttctgccagatgtccaacattacaattcttgtttcgtcggtatttcttctgcagatacgctgactgatcatatgtttccactcataaggtgtggcacagatgatcaggatatttcttaaagcatgggggagggcatatccggcagaatcatgatgaaatcccacagaacacaattcctgatagcatctgagatccgataagcagcttttcagatagaccatcttttgaagccagagcataaaataaatattgtacgcaaggaaaaaatgagcataggagtagtggcaggtggcacttttgatttttcaagtgaagtccagaactttatgataagattcataatcgaaacaattatgccgatatatagaaaagaacaggtaaacggatttacgatgtgatatgtacaaggaggacaacggatatgtcaatgaatgtaagcacaaccacggctgcttatgcaaattaccagaacaactacaagactggtacagcaaataagaaaaaagaaacagcacaaacaacagaaaatacgaaattaaaggaaaatacaactgaaagcatcgctgaaaaaaatctcagtaaagcggcacaaaaaatgctggagaatttgcgtggatcaagaaacgacatggattttatggttgccgattttgaaaatggtgataatgccaaagatattttagcccaaagtgataaggaatatacagttattttctcaaaggaagaaatggagaagatggcatcagatccaaaatattatgctgaaaaaatgcatagtattgaaggagttttgcgtatgacagatgaaatcaatgcccagttcggctttgaaagagcattcggtaagactaacgataatgcagatgctgatacaaaaataacaaaatttggcatatcttttaatagtgacggaactacaaccttctttgcacaactggaaaaatcatcagccagtcagaaagaatatcttgaaaagcttcaggaaaagaaagctgctgagaagaaagaggcaaagaaaaaggaacagtcaaaacaaaccgaagtaagaaaaactacggttcaggcaaattcaaaagaagaacttttggataagatcaaaaacattgactgggattctatcaaacccgaggagaataaaatcggtggaaggtttgatttttcaatctagtgaatttggaacagatgaaatatatgccaatatggaggaatatattatgcagataacaagagataattattcgcaatatgctcaaatgattcagcagatgttcgggaaaaaagcaagttcaaatgatccgttagcacaatgtgattatggtaatttctcattaagatttaagcctgtggacattaattttaccaaaccaaactgggatactatcatgacaaaacgagataaaccagcgatgtcagaggaagaatttgacgaagcaataaaagaacttgcaagaaaagagtttgctactggaaaaagggatgatgatgcttatcgaaaattgtgtatgcagcatggagaaacagtatctcctgatagaaaggctatatatgaatcaagcatgaaaaaaactggtggcaaaatgaatgctgcatgtatgttttgggattcaaaaggtaataaaacgctttcttataatccagagtcaagaaactggaaagctataagtacagatgaagaatttgcaagagcaagagtgtttacatcaatttataatgatgagttagctcgtttgaaggaagagtatggcgaaaaagcgaaaggaaatgtttcttatagcaaaataaaggtagatatatccgcagagagatcaaaggaaaagaataataatgaaggcaatactattgatttgcaaatttagattgttgattgcgttttagcaaatagtagataaaaaacggaaagatattcgtcgctggtagcagcattgagttcataaattactagtgttaataattacatctacctattcggaggtgcattagcgtcataattccgattgcggaagagactgaaaaaggttaggtggttggagttgtggtgacatataagaaaagataaattgatggtttattccatacgggaataaatcttcatcaaatctttatttttttctgttaggttatatttcagtaagaaatgaaatatagaaggaaggatagtaaagatggaaatgatgttacagacacaaaatctatgtaaatattttagaaaacagaaagcggtaaataatgtttcacttaatatcgaaaagggacagatttatggactgcttggaccgaatggtgcgggaaaatctaccacgttgaaaatgatgaccggtatgatgaaaccaactgcaggaaagatttactttgatggaaaacttttggataggaaagatttatcaaaaataggagcgttaattgaaaatccgcctatttatgaaaatctttccgccagagagaatttgaaggtaagacaattattgcttggtacagatgaaaacagaattgatgaggtcttgcagattgtatcacttacaaacaccggaaagaagaaagcaggacagttttctttggggatgaagcaaagactaggcattgcaatggcattgcttggagaaccggaacttttgatattggatgaacctacgaatggattagatccaataggcatcgaggaattacgagagctgatccggtcttttccggaacagggaatcactgtaattctctccagtcatattctctcagaggtacagttacttgcagataaagtcgggattatttcaggtggaatcttaggatacgaaggagcattaaagcagggagataatcttgaagatttgtttatgaatgtggtaagaaaaaaccagaaagcaggtgaaatccatggttaatattataaaagcagaacatcaaaaagccaaaagaaccatgcgaaaaaagtttatctggggatttcctcttcttacatttgtcatggcatttatatttactcttgggatgacaaatgcttatgcagaaagtgtttggaactggtggtatacacttttgctgccggggatgattgctctattttgttatctttctgtggcgcaggagaaaaagataaaatactatcatttaatgactattcccacagacagaagaaaattgttgctggggaaaattatttatattgggtacatgattttgttttctaatgtgattgtgtttgcaggagcaacgcttggaggctttcttctaacgacacatgttccagtgaaaggagcgttgattgcagtattgtttctgacggtttctgagttatgggagattccggtagctttatttttaagtgaacgatttggaatgattgtaaacctgttcgtctgcctatttattaccgtcagcggtgtggtaatatcacaaaccagaatctggtatgtacttgtttctgcaatccctatgcgaatgatgtgcccgttgcttcatgttttaccaaatggacttgccgcagaagcagggaatcctcttttggatacgggagtcattgttccgggaatgtgtctctcaatcatctggtttgtttttgtaacggttctgtttttgaaatggtttgagagaagagaggtgaaataagatgattggaagatctcttaatgcagacttgcgaaagatgaaaggaacatctgtgattctggcacacttactgattccgattataaccagcgttatatttttaatatattactttttttcaccatggaatgaaaatatgaaagtgattgcattttatcaggcaataggagcaggacttccggtacttattggaatttttacagcaagtgtgatggaacaggaacaaaatgcaggtgattttcaaaatctgctgtctttaccggataaacctgcagcatttttatcgaaactgttgatgctactggttttgtgtctgtgctctatcctattgacagcaatcatattcggaattggatttggaagaatcgaatcaagcgatatcgaaatcatgaaaggatgtatatttgcagcattgctgctgtggggaagcagtgttccactttatctgtggcagctgattctggcttttcagtttggaaaaggggtatccattggagcagggattatatcaggactaattagtgcattgatgcttaccggacttggagattatgtgtggaaatatgtatttgtctgctggacgggtagagtaccatatacttatctgcaatctgtattgggagaaactagtgtaggtgaatggttgtcattcataccaggttgcttaatatttacagggattagtatggtatactatttttggtgggtaaaccactgggaaggaaacagaatatcggaatagaatcgagggaaactatggcaaaaatactggcagttgatgatgaaccggcaattctggaaatgatagaaagcattttgaataaggatggacatctggttaccaaagtaagtaatccactaaaaattaatatggaagaattacatcgttatgacctgattttactggacattatgatgcctggaattgatggctttgaattatgcaaaagaatcagggcacttgtggattgtccgattttgtttcttacggcaaaaacggaggaaaacagtctggtaaacggactttctttaggagcagatgattatatttcaaagccatttggagtgatggaacttcgggcaaggatcaatgcacatcttagaagagagcacagggaacattctgtccggatggttttggggagggtctgtattcaaatatctcaaaagaaactattggttgatgataaggaacttcctcttacgaaagcggagtacgaaatctgtgaatttctggctaaaaacagaggacaggttttctcgaaggaacagatattggaagcggtctttggctttgacaatgagagtaatgacagtactataatcacgcatatcaaaaatataagagcaaaatttgcggattatgattatacaccgataaaaacagtctgggggattggatataaatgggaagagtaaagagaagcaatgcactcagcaggatttttatgagatatgtactggtcatgcttggatcattagttggtttggtgattgttgcttatctgctgctgtaccttttgattagtgtgggctgtatttatccggcaaattatgcagagcaaaagattaatgaagcatatgatacgattctacgtgcagataaagtgactgctgagatgattcccgcactttgtgattatgtaatcttttcagagaatggagagaaaataggtggagatctgtcagaacaatacgaacagatagcatggaatgttgcaaagcacggaaacgcatccgggaaatatttttataaagtaattgtaagggaaaatgaatatgttgtattgcaatatcgcctgacacctcaatatcattcagcttttttgagggagcattttataggaccacagaatgtgatgattattatgtctgtgattggagcggtagcgattatcatcattcagtccatacgttttggaaaaagaatcaaaaagcagatgcagcctgtattagacgcaatcggacaaataaaggatcaaaatctggaatatgagacatcctgttccggtatcaaagagtttgatgactgtttatcggcaatcgatgatatgcgagatgcattgcgagaatctttagaaaagcagtggaaaacagagcaggaaaagaaacagcagatgtctgctttggcgcatgatattaaaacacctcttacgattgtacggggaaatgcagaactactttcagagactgaactgaccacagaacagaagaataatatcacttatgttttgaacggcacaacacagatacaaagttatgtaaaacagttgatagatgtcacaaaatcatggaattgcagtgatgttacctatacaacggtgaggttagaagattttttcgcagatataaaggaacaggcactcggactggtagaaatctatcaccagaagatagattggaaggcggaacaaagtgataaaaaggtaacgattgcttatgatccaatgttccgggccgtaatgaatatgattcagaatgcagtggagcatacaaaagaaaatggaatcatttatattgacgcaaaggagcaggatggccgactgacattcattgtggaggatagcggatcaggatttacaaaagaagcattattgcatggcacagagcagttttttatggatgacacaagtagaaatggcgaagcccattatgggatgggactattttttgcaaaaactgtggctgaaaaatatggtggaggtattaaactttcaaattctgaaaatacaggtggggcgagggtagaaatatttttcctgagtagtcaggaaacaagctaaatagaccgcaattaagctatgtaaaagaaattttacatgcttttatctaatatgtaacgagaaaaatgagcttcgtaatcgaaatcttcatataagtggactcttgaacgaagagaaagtggacattggggatacaaaagtggatattgagaatggaaaagtggatattcaggacaaaaaagtggatattgacagtgtactttccgaaaaaggtagtgatttctcggtaaaaacgatgattcatatccatagactttttgagaagtttggctttgatgaggtgtttggaagaagtgcagttatggaacttcttgagctgaaaggttcaggtgcttcaaaacttctttccaatttggtaaaggcagatattattgaaccggtatccggtcacggaaaagggaaatataaatttaagaagtagtttataagacttccttgaaattatcgacatggtgtgtagacaatctgatgttttgtcttcggcagtaggataaagaagataaggaaacagaacagaaatagattataaaaggtctgttgggcagtatagcctaatgaagcctacagaaaaaggttgcgtgaagccacataaaaatgtataattaggagtaatgaatttcatattaaatgatattggaggtactcatgtcacagtcggttacgataaagagtaataaatatggaatcaatttaattttagatgcggatatgccatttgctgatttgataaaggcagttgtggagaagtttaaggcatccgccaatttttttaaaaacgcaaagcttgctatttcatttgagggaaggcatctttcagatgaagagcagcagcagataattgcagctattgaggaaaataccacaattgagattttgtgcattgtggagagtggtaccgagcaggaagccattatgaaggagcaggttgaggcatttaatgaggcagtgcagaagcagtgcgagaatgttgcgacagtcagtgttccagagcagttttaccgtggtacgcttaggtcaggccaggtgattaccagcgagtcttcggtcacaatcataggtgatgtcaatccgggagccaagattatagctcagggcaatatcgttattcttggcgctttaaagggcaatgtccacgccggatgtacaggtgacaggagctgttttgtatttgcacttgatatgcagccgattcagattcagattggtgatttgattgcgaagagtccggacgagcctcagccaaagcacagggtaaggcgcaaggaaaagccggcacaggagcaggcgcagatagccatcgcaaaggatggatatatttacatcgaaccaattactaaaaatattttaaatagcatttaggaacgtaggaggaagaaagttcatgagcgaagtaatcgttatcacatcaggaaagggtggtgtgggcaagaccacaaccacagcaaatataggtacaggtcttgcacagttaaataaaaaggttgttatgattgatactgacatcggactgcgtaacctggatgttgttatgggacttgagaatcgtattgtatacaatctcgtagacgtcgttgagggtaaatgccgtatccgtcaggctcttatcaaggataagaaatatcctgatctgtgtctgcttccatcagctcagacaagggacaaggatgctgttacacctgagcagatggttgagcttatcaatgagcttcgtgaggagtttgactatattctgcttgactgcccggcaggtatcgagcagggcttcaagaatgccgttgcaggagctgaccgtgcacttgttgtcactacacctgaggtatcagcaatccgtgacgctgaccgtattgttggccttcttgaggcaaatgagatgaagcgcattgatctgattgtcaaccgtctgcgtgtcgatatggttaagcgcggtgatatgatgaatgtggatgatgttacagagatccttgcagtcaacttaatcggtgcagtaccggatgatgagcagattgttatttctacaaaccgtggtgagccgttagtaggttcagacagccttgcaggaaaggcatatatgaatatctgccgccgtatcatgggcgaggaggttcctttccttgatttaaaccagaagcatggtgtctttgaaaagctaaaggatatgtttaagaaaaattaaagggggatacgtaccatgggtataatggatttatttaaaaagaaatcttctggtaatgttgcaaaggatcgcctgaagctggtgctggtttctgaccgtgcaaactgctcatcggagatgatggagatgatgaaaagggatatcattgaggttatttcccgctatatggatattgatgcggaagctcttgatgtgaaaatcacagagaccgagtctgattctaacaacggaatggttccggcacttgttgccaatattcctatccgtgacatgaagcatcgtccggatccaagatagagtaaataaaataataggatatgataagatatgagggtcaaaaggtattttggccctttaattattatattgaataaaaagacttgatttgatattagagtgtgatatactttaatacgttacaaataaataaattttagcagagtagacacatgtgcgttaagtgccggatgaacagggagttgtcacccggacgaaaagaaaatcttgcggtacatgagtcgcatcccgctgcatccgaagatattaattatctcctgttgtagttcggtgaggtctgcaaaggaggtaattttttaatgaaaaaattcgttactttgttcaccgattctgcccgagagcttaaatcggtcagaaccatcacaactatggcaatgcttgctgcagttgccgttatccttggatatttctccatcgaatatggacagtttatccgtatcggtttttccggtattccaaatggtatcgttgattacctgtttggaccggttgccggggctgttttccacggagcgcttgacatcatcaagtatctgatgaagcctacaggaccattttgtccacagcttacacttgttgtaatgcttgcaggtgttttatatggatgtttcttttataagaaaaagcttaccatatggagagtgcttgctgcgaagtttgtagtaatgcttatctgcaatgtcattctcaatactctgtgtctgcaggtactgtatggacaggcattaatggcaatccttccaatgcgtgcacttaagaaccttattatgtggccgatagattcaattgtctttttcggcattgcaaaggcactggagcagattggactgttccgcaccttccgtaaaccggagcttgtaaagaatgcatagcaacaggtgaatggaccgggtactcaaatgagagtacccggattttttatttaatggaaagaaatacgtataatgtggtatgtgtatcatgttctttataatgtatataaatgataaaaaggaacatagcaacagaataatgcacagacaatataatgcacaaaatattacaataaaataatattttaagtgttaaatgacagtttttatttataattttaagtataagtgcctttaaactgacaattgtgaggtatttcgcatttttaatgaaaattgttgacacaatatattgaacgtgatattgtttacttgttcaaaataatacacaaaagaaaacgaacaaacaactacatattaattatgaatatttaagagcaaagacgctaaccggtgaagcactttgctcttttttatttatcaaaatcacaaggatatttaaattaggaggcaatatattatgaaattaaaagacacaggattaacagcacaggacatcaaagacaaagtaaagaagtatatgattgagacatatgagcgtttcgatttcatcgctgagactgctgagggcatgtatctgtatgatgagaatggcacaccataccttgacttttacgcaggaatcgccgtaaacaatgccggcagcagaaaccctaaggttgttgcagcagtcaaggatcaggtggatgacatcatgcatacattcaactatccatacaccattccacaggcactgcttgctgagaaggtttgcaagactatcggaatggacaagattttctaccagaactcaggaactgaggcaaatgaggctatgattaagatggctcgtaaatatggtatagagaaatatggtccaaacagataccacatcgtaactgcaaaggacggcttccacggcagaaccttcggtgctatgtcagcaacaggacagcctggaaacggatgccaggtgggctttggtcctatgacatacggcttctcatatgctccttacaatgacttaaaggctttcaaggatgcttgcacagagaacacaatcgctatcatgattgagcctgtacagggcgagggcggtgttcatcctgcaacacctgaattcatgaagggacttcgcgagttctgtgatgagaagggcatgctcctccttattgatgaggttcagacaggatggtgcagaaccggagctgtaatgagctacatgaactacggcatcaaacctgatattgtttctatggcaaagggccttggcggtggaatgccaatcggtgctatatgtgctacagaggaggtttcaaaagcattctcagccggttcacacggtacaacctttggaggacatcctgtatgctgtgcagcagcacttgcagaagtaaacgagctgcttgacagagatcttgccggaaatgcaaagaaggttggtgattatttcacagctaagcttgagaagcttccacatgtaaaagaggtaagacatcagggactcttagttggtgttgagtttgacgatacaatctcaggtgtagatgtaaagcatggctgcttcgaccgtcatatgcttatcacagcaatcggaagccatatcatccgtatggttccaccgcttatcgtaagcgaggaagagtgcgacaaggcatttgatattataaaggagactgttgagtcactttcatagaaggcttgaattatatttgaagcaggcaacagaatatattgcggcagattttacgagccggataaaaggacaagggcgtcacgattagcttcgtgcgcccttcttttgaacaatatcagcatattataaagatgtatataagaaaagcgaggggaacgaaatggcacatcttgttattacaataggatgcgaatatggcgctaaaggaaaccagattggcaaaaaggttgctaaagacctgggaatcaaattttatgacagggatactgtagatgaaataataaaagaggtcggtattccgaaggatatcatggaaaaggttgaggaaggtatcactatcgccggaaaaggtgcagagggtgatgtcagaggttctttctccaaatatgcagacctcacagagcgtgcaattcacgtccagaaaaccataatcagaaaattatcagaccgtgagtcatgcgtgattatcggtcgttcagcagactatatactaaaggaacataaaccgattttacgtattttcatatattcaccggatgaagtgaggattgaaaacgtaatgaagagccacaatttgtcggaggatgatgcaaagctttttatcactgaaaaggataaacgttatcataagcgtcatatggcgctgacaggaagcaaccgaggcgacagacacaacagggatatgcttatagacagcagcctgttaggagtggatggcacagcggagcttattgagtctctggcaagaaaagtggtagagaatgaaagtaagacagaagctggaggtgacaagtaatggaacagaaaaaatcagaatttaataaagtcctgaatgcctgggacgtacttgtaattgcatttggagccatgattggctggggctgggttgtctcaaccggaggctggattgaaaagggcggagtgctcggtgccgcaatcggcttcgtaatcggcggtatcatgatatttttcgtgggaatgacctacgcggagctgacagcagccatgcctcagtgcggtggcgagcatgtattcagctacaaggcaatgggttcgacaggttcgttcatatgtacgtggatgattatccttggatatgtcagtgtggcatgctttgaggcgtgcgctttcccaacaatcatcacatatctgtggccgggctttttgaagggctatctgtatacggtagcaggctttgatatctatgcttcatggcttattgtggcgatagttgtggcatttttaattatgatgataaacattatcggagcaaagacagcagcgattttgcagactgtgctcacatgtattattggtggcgccggaattttgttgataattgcatcggtaatcaatggaacagttgataacctggacggacagatgtttgcaggcagctctgcaggtctgaacataaaggcaattatcggagtggcagctctgtcaccattttactttatcggatttgacgtaatacctcaggcggctgaggaaatcaatgttccggcaaagaaaatcggctcaatacttatcttatcagtagttatggcagttgtgttctatgcacttgtcattgttgcggtaggtcttgtcatgggcccacaggcaattgttgattcagagcaggcaacaggacttgtcacagcagatgcaatggctgccgctttcaatacgaagataatggcaaaggttataatagtcggcggaatgtgcggtatcgtaacctcatggaactcatttttgctcggtggctcgcgtgccatgtactcaatggcagagtcatacatgattccaaagttttttgcaaagcttcatccaaagcacaagacacctatcaatgcactgattctcatcggatctctcacaatgcttgcaccttttgcaggcagaaagatgctcgtatggatcagtgatgccggcaactttggctgctgcgtggcatattgcatggttgctctttcatttattattcttcgcaagaaggatccggatatgccaagaccttataaggttcccacatacaagttctttggaacgatggcggtcatcatgtcaggcttcatggttgcaatgtactgcataccgggaagcggcggatcacttatcgcccaggagtggggcatcgtgcttgcatggtgtgcactcggcgtggtcttcttcatcttctgtaaaaagaaatacaaggagtcatttggtacacttgttgagctcatctcagatgaggatgctgcaacacttatgccggaggcagatgaggttgaactggataaggttatcgatgctgcaatagacagggtacttgccaagaaagcaagctagtacattacaaaatgaaaaatgcattttataacataaaaattgaaaaatgggatgtaagaacaggcaaaataaaacgcaaaaagtgtaaaattatatacatgaaatgagatacaaaaattcagaaaggacagattatatatggaaacatttaatttctcagtaccacaggacatcacagtgggaaagggcagtctttcaaagctgccggaaatagccaaaaagtttggaggtaagcatgcactcatcatttcaggacctcatcttgagaagatgggacttgtaaaaaaggcagcagattatctggcatcagttgacataaaagcagacacttttacagatatagaggcaaatccatctgtcacaacagtggagaaagccacagcaaaatacctggagtcgggcgcagactttatcgtggcattcggaggcggctcaccgatggatgtggcaaaagcagtgggtgtagttgccaaatatggcggaagcgtcacagactatgagggagcacacaaggtgccgggaccaatcgtaccgctcattgcgataccaaccaccgcaggaaccggctcagaggtgacagcattctctgtaattacagatcatagcagaaactataagcttacagtattcagctacgagatattgccaaaatatgcaatcctcgatgcagaactcatcacaacagcaccggcaagcgtagcggcagcatgcggaattgatgcatttatccatgcagaggaggcatatgtatctacagcggcttcgccattttctgatgcactggcagaaaaagcgatggcacttatcggaaaaaatatccgcagatttgtagcaaacagaaacgatatcgagtctgctgaagccatgatgacaggctcgctttttgcaggaatagcattctcatttgcaaggctcggaaatgtgcatgcaatgagccatccggtcagcgcatttttcgatgtgcctcacggagtggcaaatgcagtgctgcttcctgtaatcgcagagtacaatgcacttgcagatcatggaaagtatctgaccatctacaatgatataagcccgattcctgcgtatgcggacgaatttgagcctatgatgcttgtagatgcaatcagggagctttgcgcagacatcggaatccctgagaatctgaccatcgcaatcaacaatgccagcaaaaacggaacagtcacaaaggaagagatagaaagcaagatagagccgatggctgtcgatgccatgaagagcggcaacattgctgtcaatccaagggcttcacgccagtgcgatatcgagatgctgtatcgcagggcactgtaaaacttataaaatacaacatgtaaggtaactattccgaatagttaccttatatgattatcaacagtatagttagagaattaaaagcaaacggagatatgagtatggattatctgtcacacaatgtatctgaaaatttaaaaagaatacgtcagtcaaagggcatgagcttagaccaggtcgcggaacagaccggtgtgagtaaaagcatgcttgctcagatagaaaagggcacagcgaatccatctatcggagtgcttggtaaaatcacaagcggtctgcgaattgagtttcaaagacttatagatccgccaagagtggactatgcgctcatatctccggatgatctggtcccgacaaaggagcttttgggacagtacagggtatggacctgcttcccatacgaggactcaagggaggttgaggtataccgtatcgatgtggagccgggcggcgtgtatacaagcggtgggcacggcgagaaaacacgcgaatatcttacagtcacagacggtgtgctaacggtcgagtgtcacgaccatgtgcaggaaatccataggggacaggtgtataagtttgagaccgatcagcctcatttgtatcgcaatgatggtgatagggtggcaagctgcatgtgcttctttttggattatactaatattcggtgagatttttagcctctcctcaccacagcacttttccctctaaaagcaataccgatgcttataattgaattcacaccattatcgcgcagctctgtgtcgtatttctttgcttctatctgttgcagggcgctgtcggctaatgcagataaatcggtatgttcatctttagtgtgtttaaattcaaagataaatccgggcattccctttgttaaaggcataagctgaatatcaaatcgaccgaggcctgattcgcggtttgagcgtatcttgtagcggtttccaagtatggcacaaagaccaagcatcattccgtgatagaagccttcattagctccatcaatagaagaaatgctttttaccataaaatcctccagcagagcctggagtttttgcgtgtccttggaaaagatagcctgactgatagatatggcaaggctattttggttggtgcggtttagaacctccttttcgtaaacaaaagtaatttctttgttcggaatagcaacgtcacacatgaaatttccatcgctttgcggataaatattggcaaccttcaggtatccggctaccagaagaaagctgtatatactatatggattattctgaacctcgggatagataacaccggtatcaatataggctgcgattttttcaccacagagcagcttataaaggtctttggtaatttcaggcgtagctgcctggataatttctccgattatctcattgctgccggtggattgccagaatgctttcggaaagcagttgtcagagatataattgattacagaccatggattaaagatttctgtattgccaaaacgatatccatcgtaccattcgctgagctcattatatttatcatcttttccatagtatcgcagcatgtcttttacctctttttcagtaaaaccaaaataagagctgtagccatcatcgagaatagaataggttttcagattgttcatgccgctgaagatactttcctttgctacacgcagtattcctgtaagaaagccaaaggcaaggtgtggattgtccttgagtcctcctgagaaaaaattgcgcatgaaatttactatttccggatagaaattgcaggtatgcccctgctggatgggtgtgtcatattcatcaatgataatgatacattcccttccataatgcttatgaagcagtaatgataaaagctgcagacccatctgacaatcgacttcatccccgctgtctccggcaagaagatgatattgttctttttcgtaagcggttaaaacagaacttgtctcaagctcgttatgtcgtataaattccagagatataagcctgcggattttctgaaaggtttcttcccaggtcatgcttttaacatctttgaaggtcaaaaaaatgacaggatactgtccttggtgtttagtgtagtaatcgccgcattgccatatctgtttgtctttgaaataaacagatgtatcctcgtttgttttttcaaaaaatacgcgcagcatatccatattcagagtttttccaaaacgccttgggcgtgtgaaaagagataccattggctttttatccagaaaatcacgtatcatcagagtcttatctacataataatagccggtggttgcaagcttaaaatcagatacacctattggcagagatttatttttcgcgaaatgattcatgtgtatggtttcgtcagggattaaccatttacgtccttcctttattgcaccgggcaattcaccgtttttgcacatctgctggattcttcgtacagaaaatcccattgcttttgatgcatctgagcaagataaatattccatgtggcacctccgcataataatttaatagcaatactttgattatattatatgtcattatgcgaaatataacaactgtgatttcacattgatttcgcataacaaggtgaaaatttcgcatagatttcgtctacaaacgaaatgctatgttatttatcaggtgttatcctgtgttttcattggttatcctattgcatatataggtttacctatatataatgatgtacgttgagaaacaaattgttttaaaaagaacatcccaggagaacacaatgcaaacattaaagaaattcatcaaatactataagccctacaaaacagtctttttcatagacctgctttgcgcaacaataatcagtgccatagatctggcgtttccgcagctgcttcgcacgctgaccaaaaccctttttgcaggagcaccgggaaaaatcatttctgcgctgattcctattacaataggccttttggtggcatatatcatacagactgcgtgcaggtattatgtgacgtatgcggggcacatgatgggagcgaggatggagcgcgacatgagaaaggagcttttcgaccaatatgaaaagctttctttttcgtattatgatcagaataattcaggacagatgatgagcaagctcgtatccgatttgtttgatatatcggagcttgcacaccacggaccggagaatctttttatatcgcttataaagataatcggttcgttcatttttctgtttatgataaaccgtatgcttgcggttcctatgcttattcttgtggtgcttatgcttgtattttcatatggccagaataagaaaatgcaggaaacctttatggataacaggagaaaaatcggtgatattaattcgagtcttcaggatactctggcgggcataagggtggtacagtcatttgccaatgagcgtatcgagcaggaaaaatttaacagaagtaatgaaaatttcctgatttcaaaggatgcaaattacagatgtatgggaagctttatgagcggaaatgcatttttccaggggatgatgtatcttgttacgctggtatttggtggttttttgatagcgcatggaaggatggaggcatccgaccttgctatgtatgcgctgtatataggcatctttatcagtcctatccagatacttgtagagctgactgagatgatgcagaaagggctttcgggctttagaagattcttagaggtggtggaaactgagccggatatagttgatgctgctgatgcaaaaccgcttaaaaatgtaaagggaaatgtctgttacgaggatgtttcgttccactatagcgatgatgatacaccggtgctttcgcacgtatcctttgagataccggcaggaaaatcaattgcgcttgttggaccgtcaggaagcggaaagactacaatatgctcactgcttccgcggttttatgatgtaacggagggcagggtcacaatagatggaaatgatgtgagaaagctcacgcttgaaagcctgcgctcgcagattggactggtttcgcaggatgtttatctgtttggcggaagcataaaggataatatcgcctacggaaaaccggatgcgacgatggatgagattgtagatgcggcaaaaaaggcgaatatccacgattttatcatggagctgccggataaatatgatacgtttgtcggggagagaggcacccgtctgtccggaggtcagaagcagaggatttccattgcgagggtgttccttaaaaatccacctgtgctcatacttgatgaggcaaccagtgctcttgacaatgagagcgagcgctttatccagaaaagcctggaggagctggcaaaggacagaacgactatcacaatcgcccacaggctttcgacaatcagaaatgcggacgaaattcttgtggtggctaattgcggcatcgctgagagaggtacacatgaggagcttttggcacgggacggaatatatgcgcgctattatgatatgagcaggtaggattaaggaaatttccactgatttatgttattatagctgcataaactaactatataggagcagacactatgcaggcaatgttcatagacgtagacggcactttaagcagtccgtgctacaaggtaaacggaaaatttcagataggaatgtcagatgtgcagtgggcagactactgcagtaagcatggtgaggatacatatgagtggtgccgtcctgtgatgcaggtaaaggagtatgccatgaaggcaaaggaaaaaggcacgaagctgtatgtgcttaccacatcaggcactaaaatcgagacagctgcaaagcgcagatttttagacagatactatgctggtatgtttgatgacatctatgcggtggagcatgatgatgacaaggtcaggttcattcttaaaaaagcagcagagcttgggattgaaccgtcggactgtgagcttgtggaggatacataccgcatacttttgcagacagtgacagaggggattaaatctactcacatcacaacgattctcacaggcggatgcgaacggtaaccaaaaattttccacggtctataaagaaataaaaaaaacatccgataaatatgtcaggaagcaaaatttacatatttcaaggatgagatataatagaaaggagatcctgttatgcgtatagatgcatataatcagatagcccagttgtatggcgtatcaagaacaacaaagacagcaaagacacaaagcgcgtcgaggatgtctgatcaggtatcaatttcgcaggccggtagagattaccagattgcgaaaaaagcagtatcagaggcttcggacatcagggaagataaagtcgctttgcttaagaacatggtagactctggacagtatcaggtcagtggagatgatttcgccagcaagctgttagagaggtacaactctctataatatgataatcatatcatatatcaaaggtaaaagaggattttatagtggctagtttagtggaagagcttataaatgtgctcacagaggaagaaaaagtatacagaacactcgctgcaaatggggagaagaaacgtcagataatcatagatgccgatatccctgcgcttgaagcaataactgatttggatcagcaggcaggcgatgagcttcttattatgagcaataagcaggtttcacttctcacagatattgccaatgtactgggcaaatcagatgagaagatgacagtcacaaggctgattggatatctcggtacacagccggatattcaggcgaagcttacggcagcgcgcgacagtctgattgaagcagctgcacagatgaaagaaatcaacgatttaaactcacaattacttgctcaggcaatagagcttacagagtttgacatcaccctgttcaagagcatgaaacaggcgccggagaccgccaattatgacagaaatgcatataacacaggcgatatcttaggcagcagcggttttgatgcaaagcaataatcattaaccgggaggacaggaacatggcaaatggattcggaagtttttacgtaggtagttccggacttaaaaactcgcagaatgctcttaatacaacagcaaacaacatggccaatgtcaatacgacaggctatgtgcgccagcaggtaagattttcagacaaacattatatcaccagaaataaccctacagcaggcaccaacatccagcagagcggactgggtgtttccgtatcggatgtggcacatgtcagggatatattcttagataaatcgtataggcaggagaatggtcgaaagggcttttactcgacactttacagcaccacatcatatgtggaggatatcatgcaggagatgaacggtgctgagtttaaggagagtatatcagagctatggcaggcttttcaggagtatggcaaggatccgacgaattcaacgaatcagaaccttatcatccaaaagagcgagctttttctgaccagatgcaatacggtttattctgatcttcagaaataccagtcaaatatcaacttacaaattaaagaccaggttgacagaatcaacgaaatcggcgacaagatttatgcactcaaccttgagattcaaaagacagagtcaggcggtgtagagactgccatgacagcgcgcgatgccagggacagtctgattgatgagctcgcaggttacgctaagatagaggctgaggaggattccacaggctacgtgcgtatcaagctcgagggacagcagtttgtacaggataacaagtgcaaccatataggcctcaccgaggaaaagggtacaggcttttatacaccttactggcctcatattactacacaggagagctatatgccggtgtttagtgatgttgcactgccgtcagcgctggctgaaagagtcggctgcacgcagaccaccaacatagcaaccagcctgaacaatgatataggaagcctgaaagcactccttgtatcaagaggctcggagtatggcacctatgatttcatgagcgaggagaattacagtagggtggaggacaatgtggtcatggagacacaggccgagatatcatatctggcgcgaaacatcatgatggccatgaacgatatattttgtccgaataccacatatacagcggcagacggtaccacatacacggttttggatacggcaaactgctcggtaggagccgatggcagcctgccaccgcatgagctctttgcaagagaaggatatgaccgttacacacagatggaaatagatggcaggcagttttatgtatacaatgatgagacaaaggctaacaactcatcatggtacaagcttggaaatgtttcagtaaattcaaagcttgcagcgcaggtgacactgatgccgtcatacaagcaggacggatccgcaaattatggtcttgcagaccagattacaaaggcatggtcagcagagaatctatacatcaacccaaaggatacgtcaaagtgcaattttgagggatactatgacaagataatctcgcatctcggaacaaacggcagcatatataaggcatcatcagatactatgacatcgacagcagcggccatagacaaccagagaaaccagataatgggtgtgtcgagcgacgaggagctgacgaatatgatcaagtatcagtcggcctacaatgcatcaagccgttttatcacagtaatcagtcagatgacggagctcatagtacagctcatatagttttaggatacgacaagagagtatgaacaggaggagtcgatatggcttcaacattttttggattacatatagggtcaagcgctctgagctcatttcaggtagcgaccaatacaacagccaacaacatagccaatgtcaagacgaccggatacaccaggcaggaggctaccctgcaggcaaaggatgcgataaatgtcacagcccgctacggaagcgttggcacaggtgttacagtcacctcaatcaaacagcagcgtgacctgtactacgacaataaatactgggaaaacaattcctgctatggacgctatgagcagaagctgtattacatggaacagattcagaactactttaaggataacggttcatcggtaaagggattttcaagtgttttttcacagatgttttcagaccttgatacactgcgcagcaagccgtccgacaagacagtgagaaatcagtttatcagcagcgcgcagagtctttgtacatatttcaaccagatgagtgacaatctctcaaagctgcaggatgactgcaacgaagaaatcagaaacaacgtagacaaaatcaattcaatcagtgagaaaatttcactgttaaataaggagattaaccagatagagacaggaaccggtgtcgaggccggctcacttagggatgagagggcgaatctcatcgacagcctgtccaagattgttaatgtatcttataatgagacagaggtgcaaaacacctatggagacaacctgggcggcacaaatttctcgctctatataaatggagagaaggttgtggagggcaaggattaccgaaagctcatctgtgagtcgtcaaagacgaaaaacaatcagacagacaacgatgatatgtacaagatatactgggaagatactaagatggagttttccgcgacagccggaactgcagggggaagcctgaaagctctctttgaggtgagagacggtgataatctggagaatttcaagggtaaggtcacaaaggctgattcgtattcgctcacagtggagaatatatcaatagacaatataaaatcactcaatctgccggacaaggacggcaaaatcactgtaaataatatcagctacagctatgacagctgggaggcacaggtggatgcgcagggcaatatcaagtctgtaacatttaatctgagcaaggacaaggccatagcagaccctgaaaagactgtggcagagggatatcttttaaatgcgggctctgcaataaatgcgaggggaatcccttactatatgacacagctcaacgagtttgtcagaaatttttcagagatgttcaatcagatagagagcaaaggacagaatctgaatggggatacaccacctacattttttgaagcaatcacaaacacagccaaggtatatgatttctcggaatcagaggcttacagcaagctgcctgatggacagactgccacaataaacagcagctccaacacgtattacaggatgacagcggccaatttctccgtaaacaaggatgtgatgaacgatgtatcgctttttgcgacttccacagactatgtcaagacagattcatgtgatatagttgatgagttaaagaagctgcagtcggagaaaacagtatacagaggcgataaagcggaatcattccttgagacaatcatctccaatgtgtcagtggatacggaaaaggcagagacctacaacaagctctatagcaatctggagcagactattgcaaaccaaagaacatcggtatcaggtgtggatgaggatgaggaggcattaaacctcgtgaagttccagtattcatacaatatggcatctaaaatcatatcggttatgaaccagatgcttgataagctcataaacgatacgggcgtggcatagaagcgggaggcataatatgagaatcacaaacaatatgataatgggaaataccaagacaaatatcaattcaacaaaggttttggtggacaaatacaatacccagatgactactcaaaagaagatatccaaggcatcagaggatccggttatcgcaatcagatcgcttcgcttgtcgaccagcctgtcgcatcttgaccagtacaaggacaacaatatcccggatgcttcttcgtggatggatgtcacacagacagcccttagcaacatgaaatcactcctcacagatatccgtacacagtgtgtaaacggctctacagatacgctcacagctgatgtcagaaacactatattacagcagcttacagcgctgtcagagcaggtgtatacagagggcaatgcagactacgcaggaagaacggtatttacgggctaccgcacatcatcaaagctcacattccagaaggacacaaagagcacatatcagataacacaggagttttctgccgctgatttgtcagagaagcggtattatacaaatggcgtgactgttccaaatagtataaatgcggcaacacctgactgtaccacagatgtcacagagcacagcttccagagaatccgtctgggctacggtaatacgacagatgatgtgaagctttctatcgatggaaaagagctgacacagggcacagattatactgtatacaagagtgtgtctgattttgacccatcaaagctctctgctgatgatacggcatatatacaggaaaccggtgaatttgtttttggtaaaaatgtagctgcttcaattaagaataatgaaaagaagctgtctgtcacatatgtaaagacaggctttgacagcagtgatgctagacctgagtattattacaactgcaaggatattacaaatgctgtgacactcgatgcaggtggcaatgtaccccatgatgcagcaggagatatcatatactccgatccatcaaaggtagtggattttaagttttcaagtcaggaaatcaaatacacagtggcaaacagcaccgatatcactgtcaatacacaggcgaaggacgtcatggatacaggcatcaagcgtgatgtggatgagttgattgatgtagttcagaatgctgtcaatgctcacgacaaggtctcacagataaagaatatgatgcagcaacagcagtactctgacaaggattcacaggcaaagcttaagacatatttagaggctgcagagcaggaggctgactatgccgacaacaatttgcaaaagacctacagccagtacatcacacgctttgatgatcatttgaataaggtaaatctggcactcaccaattcgggaagcacaaagagccgcctcactctcatcaagaacagagttgaggagcagcagacgaccatagaggagcttaaatcgacaaatgaggatagggatatttctgatataatcattgatttttacgctatgtacaatgcatatcagtccagtctgacagcggcatcaaaggcaaactcacagacattgcttgattatctgtaaggattttaaaaacggtacacagctaccggattatataacgctcgcggagcgggcgaaaaggaggaagccatgagggcaaaaacgagaatatttggggaaattgacatcccacaggacaaaatcatcacaatggagaaagggatgataggcttttcggagctgaaaaactacactctgatatacaattcggagaaggagaatgataagaagtctatcatgtggcttcaatcgatggatgatggagacattgcatttcctgtcatgacaccggatatcatcatgccggactacaagccgacggtcaacgaggagcttcttgcgcctcttggagatctgaatgaggagaatatgtatgtgatcgtcactgtaaatgtgcctagcgacatcacaaagattgcctgcaatttaaaggctcctattgttgtcaataccgacagcaacaaagcagcacagcttatagttgaggatgactacaaggtgcacttcccgatttatgacattataaaagggaaaaaagaaagggcgggtgaatagtatgctggctcttacaagaaaaaagggtgaatctctggtgattaataatgacatcgagattactattctggaaatcagaggcgaccagattaagctcggtgtaagtgcaccgaaggaggtgccgatttaccgcaaggaggtttatacgcagatacagcaggagaacaggaaatctgcggatgcacagaatgcacaggctctcaaggagctgtttggatagcttaagacagagagttatatgtcgaaatttgcgaccgaaaccaattgaatgagagttctatcaaggctataattgaaccagtacagcgatataacttttttcgcagtgctggttcttttcgatgtgccaaaagcgtatagcgaataaaatataatttcagacaggaggacttcaatttggagaaagtacgttacatgatttccgatgcggcagctgccgtggatgtggagactcatgtgttgcgttactgggaggatgagctgggacttgatgtgcctagaaatgaacttggtcacagatactatacgagagacaatataaaacagtttttgaggataaaggagcttaaggagaaggggtatcagcttcgcgcaatccgtgatatgcttcattcggatgcaccaggtgagccgttaaatccaacgaatcctgcggctatggaaaaatcagtgcagcctgtaaattacacgaatatcacaaatcagacggtgaaacaggagatgtcagggtataatccggcatatcacgatgaactgccgggatacaatcatacatatcgaagccgcacggcagatgagcgtatggatgagtttcgcgagctgatgagcaatatcgtggggagagccatagcactgaacaatgaggagctgagtcagcagatatccactgaggtgcaggagcggatattaaaggaaatgaactatctgatgcgcgaacaggatattgcgcaggaggagagatataaaaagctggacgctgccatacgcggaaatctgcgtagaaaggggcttttttcaaggaaaaggaacgctgacatgcctgcagatacaaaaataagcgctgcagacaccaagggaaagaaggggcgcgacaagacgcatacgcatgagcttaatccggtgagactgtagagcatgcatgacaacgcttacactataaaaatagttactgcaaaaaacgcttacagcataaaaatgattacaatacaaagacgattacaacacaaaaaaagacgacccataacaggtcgtctttatttcttacagtatgctaaaaattagccctggctgattgctccagttgggcaaacaccagcacatgtaccacaatcgagacaagaatctgcatcgattacgtactgtgaatcaccagcagagatagctcctactgggcactcaccagcacatgtaccacagctaacgcatgaatcagaaattacgtatgccataatgaaatcctccttataaaataatgatcattattcgccgttattggcttatctgcattgtagtacaaaacacagaataatgcaatgccaaataaaattgtacttacttttacacaatcttatataaaaattaccaaatattgagtaaaacttgaaatgctattgttactattgtataataaatagaaaacaattcagaacctccgggaataaaagctgatacgtcatgtttacatgtaagcagcagattttcctgctttcgaggttgctctgaagtgttacaataaaaacacatgattatttagaaaaactggtgtttgcacatggtatattactgtagtatgtgcggtgaggatataaaatggaaacaaaaattataaaaatagatcaggacaatttagaccataagctcatgcaggaggcaggtgatttgattgcagccggtgagcttgtagcgtttccgacagagacagtgtatgggcttggcggtgatgctttagatccggaggcatcaaagaagatatacagtgcaaaggggcgtccgtcggacaatccgcttatcgtacacatatcagatttttcggatttggagcgcatcgcaaagacagtgccggaggatgcaaggaagctttcggatgctttctggccgggacctcttaccatgatagtggagaagggcgatgcagtgccgtatgccacaacaggcggcatggacacagtggctgtgcgcatgccgaatcatcctatagcgctagatctcataagaagaagcggttgtcttatcgcggcgccaagcgccaacacatccggcagaccgagcccaacagaggctgcacatgtggctgaggatctaagcggcaaaatagccatgataatagacggaggaccggttggcataggaatagagtccaccatcattgacctgacagaggatacacctatggtgctgcgcccgggctatatcacaccacagatgctttcaaaggtattaggcaaagaggtcgtcatagatccgggaatcatagcggcagatgacacgagaaagccaaaggcacccggcatgaagtacaagcactatgcgccaaaggctgacatggttatcgtggacggtaccagaaagcatgtgattgcaaagataaatgagcttgtggcttcgcacagggatgatggcaaaaagatagcagtcatcgcaacagaggagacaaagcagttttacgatgcagatgttgtcctgtcgatgggaagcagggcggatgaggattcgatagcccatgagctttaccgtatattaagggactgtgatgagctcgatgtggatgtgattttctcggagagcttctccacaccgcgtataggacaggccatcatgaaccgtatgctaaaggcggcaggccatcaggtgatagacacacatgtgaagtatgacaaaatcatttttgtcgcacagaccggcacatgcagggaacagatggcaaagggcatcatgaacgactttgtactcaaggttccgatggagattgaggcgagaggacttgttgtccagtttccggagccggtcaatcagaaggcagaggcagtgctcataagcaatggtatttccacggagggcatggtgtcaacgcagcttgaggaatcggatatcacggagagtactatggtatttactatggagtcatcacagcgcgagcgcattatagaaagctttgccgatatcgacccggagcaggtctttgtgctttcacagtatgtgggcgatgagcttgagatactggatccttatggcggcacacttcaaagctacggactgtgctatgaaagcctcagggctacgcttaagaagctggtaaagcgcttaaatgcaaatacataaaagacaaacaaatataacacaatataagacaaaggagaacaaacattatgggtaaggtagtagttatggatcatccgctgattcagcacaagattggaattatgagaagaaccgacacaggttcaaaggatttcagaacactcgtcagcgaggttgcgatgcttgagtgctacgaggcaacaagagatcttgagcttacagatgtggagattgagactcctatctgtaaggccactgtaaaggaattaaagggcaaaaagcttgcagttgttcctatcttaagagccggacttggtatggtggagggcatgcttgagctcatccctgccgcaaaggttggacacatcggcatgtatcgtgacccggagacagcagagcctatcgagtactattgcaagcttccggcagactgcgcaaacagagaggtatttgtggtagatccgatgctcgcaacaggtggttcagcagtggcagcacttgatatgctcaaaaagcgcggtgtgaaaaacatccactttatgtgcataattgcagctcctgagggagtaaagagactcacagaggcacatcctgatgtggatgtatatataggagcgctcgatgatcatctcaatgagcacaaatatattgtgccgggactcggagatgcaggagacagaattttcggaaccaagtaataataatgatgataatagctgcaggttgctctgaggtgtaaacagtgatataaaacagtaaagtaacagacagtgtgatagaccatattgaatggaggtgtatatatgggagcttcggaaaagagaaaggattatatctcatgggatgagtattttatgggcatagcgatgctttcaggtatgcgctcgaaggatccgaatacccaggtgggggcgtgcatagtggacccggagcacaagatactctccatgggctataacggctttcctcttggctgctcagatgatgagttcacctgggccagagagggagaggataacaagtatttctattctacacacagcgagctcaatgccatcttaaactacaggggcggaagccttgagggagcgaccatatatgtcacattgtttccgtgcaatgagtgcgctaaggcaatcatacagtccggcatcagggaagtagtctacgactgtgacaaatacgagggcacggccagcgtgacagcttcaaagaggatgcttagggcagcgggggttacaattcgcaggtatgagcacactgaccgtgaggtgacgcttgtactgtaatcgccgaaaaagtgataatactgcaattgttgtgtcaaattgacgtgatttgacatgaaacacatttattttttatgcattttacacataaaaatgtagacaaaagcaataaaaatgatataataatttgtatatgaaaagagataataagaaagaggtaatgaatgcacttatcatggttttccagtttggaatcaacatgattgtgccgatatttctctgcacactggccggtgtgtggattgggaaaaagaccggagcggactgggtaactgttccattgtttttccttggagcatttgcgggggcaaacaatatataccgcatggttcaaaaattcctgaagccggaggatgatggcagagccgtcagacagacaccgggcaggcagagtactacggaaacagagatatcagacagtattagcagggtagagaaggatgttaaaaagaataaatgacgcattgccgggacttgtatttgggatagttttttacgggattgttgtgcagcttattggggtatggtttgtcacagacaaaatttcatattctatcggcttatggtatgggatagcgatagctgttggtatagctgtcaatatcgccacagtcatatatgacgcgaccgccatatatggacaaaaggatgccaatcgcaggatcgtagcaaaatcacttttaaggtatattgttgttgcggtcctgttatttatattgggactatttgattttggaaatctgataatggcctttgtcggtatgctgggactcaagatttcagcgtatttacagcctttatttatgaaggtgacagacagattttccgggagaagtgatgcatcttccgccggcgaaatggagacagagtagcaaaacagcaggtaaacttaataaggaggaggtgataatgtgaatcaggcgattttactggaaagtaacgcagacaatatcgactttatgatccatggtattttttcgataaaggtattcggtcaggaggtctggattaccacatcgcatgcctgtatcctcatagtgatggccattatggtcatattcgctatagtggcaaacaggaagcttaaaaaagcaaaggaagtaccggacggctttcagaatatcatcgagctcatcgtagagatgctcgacaagatggtcgagggaaccatgggtaagtgggctccgaggtttgtaaactacatcagcacgatttttatatttatactgatgagtaatatctcaggcttgtttggtttaagaccaccgacagccgactacggaaccacactggcgcttgcacttattacatttttcatgatcagattcaataaggctaagcatcaaagcgcaaaggatatctggaccggtatgtgttcaccactgccgccgtggctgcctatatgggcgccaatcaacattatcagtgagattgcaattcctatctcattatcattgcgtttgttcgccaatgtgttgtcaggaactgttatcatggcgctggtatatggtctgctaaggtttatagccatagcgtggccgtcagtattgcatgtatactttgatttgttctcaggagcaattcagacatatgtattctgtatgctgacaatgacatacgttacacaggcatgtgagacggatgagtaaaactataagatgtatttttaggaggattcaattatggatatcaatggacaggatttaatcagagcatgctcagcaatcggtgcaggtttggcggttatcgccggaatcggacctggtgttggacagggtatcgcagcaggacatggtgcagcagccgtaggacgtaacccgggagcaagaggacagattatgtcaaccatgcttttaggacaggcggttgcagagacaacaggtctttatggtctcgttgttgcattacttttacttttcgttcatccgctcggatagtatattacggtttgccgcagaggattaccgtgcggcgatacagccaacggaaaggagagtaaaagttgttagcacagggatatacatttttgtttaatctggatgcgcagttgctctttgatacagtacttttggcagttgcagtatttttccttttcatgctgatgtcgtatctgcttttcaaccctgcaaggaagctgttaaaggacaggcaggacaggatagaaagcgatataaacacagctgttgccgacaaggaaagtgccgcagcactaaaggcagagtacgagggaaagcttaaggatattgataaagaggccgaagctattctcacagaggcgagacagaaggcgcttaaaaaccagaacaagattgtggatgatgcaaaggaagaggcttcacgcatcataaagagagccagagaagaggcagagcttgagaagaagcatgccatggatgatatgaagcaggagatgatacagatagcatcgcttatggcacaaaaggctgtcgcagcttcgatcaccacagacattcaggatacactcgttgaagagacacttaaggaaatgggagaatcaacatggctaagctagtatctaaggtatacggtgatgcattgtttgaggctgcccttgaggacaacaggctatccggcctgtctgacgaggtaacagcagtaaaggaaatcattgctgcaaatgatgacctctcaaagctgatggatcatccgcagattgataaagaagaaaaggtcagaatcatcgaagaaatatttgggggaagagtttcagcggagctggtagggcttatgaggatgattgtagaaaagaatcactacaaagagcttaccttagtcttcgactactttcttgacagagtcaaggagtaccaaaatatcggaacagcatacgtcacatctgcatttgagctttcaaaggagcagaagcttgctgtggagaaacgacttcttgacacgacaaaatacgtgaaatttgagatgcattttgaggtggataccgcgctcataggcggtatgaaaatcagaatcggggacagagtggtggattcatctgtcagcagcagattagaaagactcacccgcgatttgacaaaaatacaattgaaagtaggtgaatgcgctccatgaatctaaagccggaagaaatcagctcagtaataaaggagcagattaaaagatacgcttcccagctcgaagtcgctgatgtaggaacagtcattcaggtggcagacggaatcgcacgtattcatggtcttgagaatgcgatgcagggagagcttttggaatttccaggggaagtatatggaatggtattaaacctcgaggaggacaatgtcggtgctgttttacttggacagcagcgcaatatcaacgagggagatacagttaagaccacaggacgagtggtagaggtgccggtaggcgatgcgatgctcggccgagtagtaaatgcgctcggacagccaatcgacggaaagggacctatccagtcggacaaatatcgtcagatagagagagtagcatcgggagttatctcgagaaagtcagtagatacaccgcttcagaccggtataaaggctattgactcaatggttcctatcggacgaggacaaagagagcttattatcggagacagacagaccggaaagacggctatcgcgatagataccatcatcaaccagaagggacagggtgtgaaatgtatctatgtagccatcggtcagaaggcttctacggttgcatccatagtaaatgagctcgaggagttcggagccatgagctacacgacagtagtggctgcgacagcatcagagcttgcaccgttacagtatatcgcaccatactcaggctgcgctataggtgaggaatggatggaaaacggacaggatgtgctcatagtttacgatgatctgagtaagcatgcagcagcataccgtacactttctctccttttaaagagagcgcccggacgagaggcttatccgggagatgttttctatctccattcaaggcttctggagagagcagcgagactgtcagacaagctgggtggaggctcgctcacagcccttcctatcattgagacacaggcgggtgatgtatcggcatatatcccgaccaatgttatctcaatcacagacggtcagatatatctcgagacagagatgttcaacgcgggcttcagacctgccataaatgccggactttcagtttcacgagttggaggctcggcacagataaaggcaatgaaaaagattgcagcacctatccgagtagagctggctcagtacagagagcttgcagcgttctcacagtttggctcagagcttgatgcaagcacagcagagcagctcgcacagggagcacgaatcaaggagattttaaagcagccgcagtacaagccgatgcctgtagagaagcaggttatcataatatacgctgcgacaaagaagtatcttatcgatatcaaaatcgaggatattttaagattcgaggcagagctgtttgatttcattgataccagatatcctgagattcctgaagcaatcagggagaaaaaggtgatggacgatgatacggagcaggcacttataaaggcaatcgaggaatgcaaaaagcagttccgttagacggttggatattagtagaaggcaggtggtaaaatggcttcgatgcgagacataaagcgcagaaaaagcagtattacaagtactcagcagatcacaaaggccatgaagctcgtttctaccgtcaagctgcaaaaggcgagagcacatgcggaggcaacagatccgtatttcaactatatgtacaggacagtaagctcgatgcttgcaaagagcggcaatctggagcacccatacttaaaggccggtgattcgccaaggaaggcggtagttgctttgacatcaaaccgcggactggcaggcggatacaacagcaatatagtaaagctcatcacacacggagacttcaaaaaagaagaactcgacatatacgctgtgggagcaaagggcgaggagctgcttacgtcaaagggctatcatatagttgagagtgcaccagagatgatggaggacccgacctacgaggatgctgcggcactttgcaaaagagtgttaaaggcatttacagacggtcaggtgggggagatttatctcgcatatacccatttcaaaaacacagttacacaggaggcgaagctcataaagcttttgccggtggagctggatgagagcggggcagatgagaaagaggactccaatattctcatgaattttgaaccgaatccggaggaggctttggagcttattataccaaaatatgtgacaagcctgttttacggagcactggtggagtcatttgccagtgaaaacggagccagaatgcaggcgatggattctgctacgagcaatgcagaggatatgatcagtgatctgacattgaaatataacagagcgcgtcagggctcaatcacgcaggagcttactgagataattgcaggagctaatgcgatagagtgatacatgcatattcggtcatgggaaggcaggtatgtctgtgaatggccaagaaggcgagtgtatcatatgaattaaaaaagaaggagaaactataaatggcagataaaaatgtaggtaaaatcatacaggttatcagtgccgttctggatatcaagttttcagagggtaatctgcctgagataaacgatgcagtcgaggtaccgctgaaaaacggcggaaagctggtcgttgaggttgcacagcatctgggcgacgatacagtcagatgtattgccatgggacctactgatggtctcgtccgcggcatggacgctatcgcaacaggagcacctatttctgtgccggtgggggagaatacacttggaagaatgttcaatgtgctcggagagcctatcgatgaggttgagcctccacagacagaggagaaatgggcaatccacagacctgcgcctagctttgaggagcaggctacatcgcaggagatgcttgagacaggaataaaggtagtagatttgctctgcccataccagaagggtggaaaaatcggactcttcggaggtgccggagtaggaaagacggtgctcatccaggagcttatccacaacatcgctacacagcatggtggatactcagtatttaccggtgtaggagagcgtacacgagagggaaatgacctgtactacgagatgaaggagtcaggtgttatagacaagaccaccatggtgttcggacagatgaacgagccacctggagcacgtatgagagttgccctggcaggacttacaatggcagagtatttccgtgacagaggcggcaaggatgtgcttctctttgtggacaatatcttccgtttcacacaggcaggttcagaggtatcagcacttttaggacgtatgccttcagccgttggttaccagccgacactgcagacagagatgggagcccttcaggagcgtatcacatcaacaaagaacggttcaatcacatcggttcaggccgtatatgtgcctgcagatgaccttacagacccggcaccggcgactaccttcgcacacctcgatgccacgacagtacttgagcgttctatcgcagagcttggtatttatccggctgtagacccgctggcatctacatcgcgtatccttgatccgcgtatcgtgggacaggagcattttgaggtggcacacgctgtccaggagatactccagaagtacaaggagctgcaggatatcatcgcaatcctcggtatggatgagctctcagaggaggataagctcgtagtaagccgtgcacgtaaggtgcagcgtttcctgtcacagccattcttcgtagcaggacagtttacaggactcgagggcaaatatgtgcctatcgccgagaccatcagaggctttaaggagatactcgaaggaaagcatgatgatgtaccggagagctatttcttaaacgttggaagcatagatgaagtccgtgccaagatgcagtaatgtgaggtgatttcatggcagataacatttttgacatagaaataatcacaccggacagggtgttctacaagggagagacagacttcctcgagttcaatacccaaaacggagagattggtgtatacaaaaaccatataccgctcacgacagtgcttgcaccgggaatcgtgactatccataatggcgatgaggagaaaatagccgcaatccattcaggctttgcggaaatacttggagacaaggtcacatttctcgcagagcttgcagagtggcctgatgagatagacatagaccgcgcacaggccgcaaaggagcgggcagagcagcgcctttcaaatcacacagcagagattgatgtgaagagagcagagtttgcactcaggaaggcacttatcagaatagatgcagcgcatcatgtataaaagaattaatttaggagcttaaaaagtcccaagatccacatatataatatgctgattttggggctttttgtgtacaaaagtggattaagaagataatacaatcatacagttggctataattggtcagttatactggaatttttgttaaaaacaggtggtttttgtaagtatttgctaaattgggaaaattaaataattggtatagtatcataaaaatatgtttttaaattggtatagtataaaccgcgttttgtggatgaatggtatttttaatatattgacaattgggtgtaaacataatatatttagcttgttcgaacgagtaaccaatataccagttgttatttagaaattcagggaggtaatcaataatgattaagtttgatgaggtagagtacagaggaaatcttacaaagcagattgcagctattaataaaggatatgagtatgcaaaagagataacagcagatggatatagtaatatcttttttgtagctgttggtggaacaatggcaatgatgttacactttgcggcaattgcaaaacaaaaaacaaagattccagtgtatgttgagcaggcagcagagcttgttgttgcaggaaacacacagttaaataaagattcgcttgtaattatgggatcaaaatcaggagatactaaagagactgtagcagccgcaaaatggtgcaaagaaagaggaataagaattgcatcaatggtcattgacaaagagtcaccacttggtcagttgacagattatcaacttccattggttgtatttaaaggggttgagtatgaatatctttcaatgtttggattattctacggattattaaattgtaatggagattttccagagtatgatcagtttgtagaagcattagcaaaacttccagatacattggtagatgcacagaagaaatttgatgagccagcggatgctattgcaaagaaatattttaacgcagattatatgatgtggattggcagtggagagctttggggagaggtatacctgttttctatgtgtattcttgaggaaatgcaatggatcagaacgaaatctataacaagtccggagtttttccatggaacactggagcttgtggagaaggatatgccggtattcttagtaaagagtgcaggcgtatacagaactcttgatgaaagagcagaaaaattccttaaggagcatacagacaatctgatagttattgacgtaatggactacatgataccaggacttaagcctgagtttgcaccattagttgcccctattataagtacagcagtgcttaatggacgtctttcaaaacatatagagtcttatacaggacatgacctcgatatgcgtcgctattatagacagtttgagtactaagatatagagatgatagaagctgtattatttgatatggatggcattctaattgattctgagagagagtatgataaggccatgagagaggcaattacgagatatggacatatgataacggacgagtttttgatcagagtaagaggaattcctgtagaagcatttaaaaaaagtctgaaactggagttcggaagagattttcctgttgagaaattcagaaatgattttaagtccatagtgtggcaaaatatcagacaatatggtatgcctgtaaagaatggtgtataccagctaatacaatatctagaggtaaataatataagatatgcagttgcaacaagcaatgacagggcaatggcactagaattattagaagcagcagacctgaggggagtatttgagtacatggtatgtggtgatgaagtggaacatggtaagccatttccggatatatatcagaaagctgcggatatgctgggtgtgaatataaaacacacattggtgattgaagattcatataatgggatcagagccggtcatgctgcaggcgcaagcgttatcatggtgcctgatttagtgcagccaacagatgagataaggcaaatgacagattatgtagtaagtgatctgggtaaagtaatttcatgtatcagcaatttttgaaactggcattgatacaacatcggtcaattcgacgcagactttgacagtattcaattacattgttatttgaatctttagatattatgctgaaattcaacaatggagaattggtttcgattccaagtaaaacagcattatcaatgtcgcatatattcatagaaacgttatagctatgatgagttggaataatgttatagtcgtttttcattaaagcatataatgactgcgtttcattttccttcattttccttaacaattcaggaaacatagcctcagaaagatgagtagtttctatcattgccggtttctgatttataaaccgcaatcgtttaataatataaattggtgagtagggagataatccaagtattttgcttatataatctgtggcaagagtctggtagcaatatattaatttattggaacgcttgaagccgtttacttcacaataggcatcgagtgaaaatcccataccaatacttgttcttagttttgggggtgccacatatgtgccactcccaactatagaataaagaatatgttcattttccaatcgctttagagcttcacggcaagtggtcctgttaatgccaagctcttctgccatggcacgttcagatggaatacggtcatgaggattaagattatgcatggatatataattttcgatagcctcagcagcgtcatcggcttttacgtgaagataatgattcataagatactcctaatcaaaaacaaatttaaattgagatttcacctgttttaagagatttaataactgttatattttgttattaaattctccacaagcccttgaaaacactggatttatcgcaggtgagcttttccttattgtttcccttgtgttatatcgtcccatcagtgtttacgaactctgataagggcaaatacaagggcaagaaaaatctataaaacagtataacacaaaataaaagtgacatggtgaactgattgaaatgcttctgatttttgtaactgataattgattgaatgataaggagagataagatacgatgagaacaatatttgcagaatacaatccacagcgcaatagtattgatgtttacacctctgctggctatatgctccgcattgattgctgggaagctgaaaagaatttaaaaactacacccggatcagactgtgcattaaacgcacttgctattgatgaaccacttgaatatgtacgattatatttggacgggaatatgcagatgtgggtagatgcagaagattcattagaactatggtgatttttcgacggtgtgaaattttttctgtaaattcagatcttctatgataattgatgcggcttaatagcagttttctgttgttaagccgttgtttatttaatagcaaaaataagccggtatgtcaagaacccccagaaaatctgaacgtacatttactcttgatcatccggcttattttcaacagcactaagattaccttttttaatattgtttgggatactccctccataaccgtcacatcaattttatactttacttcgatttcaactttttctggtggattgactaaaagcctgtcaatatcattttcctcaacaccagccatttttgctatcgttagcttggatatgccataataggaaacaagcagttccaaccaatgcaccaatttgatattttccttttaccgaaccttcttatgccttaatatcaaaactcgatctatcaggtacagaaatactcacagatcctgctacaaggctttgtgtcatactttttacatcagtaccagttacggataaggtataatcacccgtttcctttctttctgccgatttttctgcacgtttctttgcagctttttcttcctctgcttttttagcagctcttttctcttttactttttcctctttttctctgttctcttttgcttttcgttcagcattctctttcgctattttcccatctggatcatttgtacaagatgctgtctctataatatttccgtttgcatcaatcatataactctgatttgtcacagtgcccaaacatccattaatcgtatcttttgtacaatccggaatggctgctaagttttcctccaaatactttgctttttccggatcattcatgcacttttgtaaaaatgcacttgaaacagataccgttgtcggaataccctgcattgaagtcagccctatattcatataatggtattttccttgcaagtattttgaataatcatttacattactataccctgtcttaatctgctctgtttttgtcacaccgggacgtgatgtttttaattcaactgtacttgttgtcacgttgccatcttttgtatttgtactatccttttcactatctgttttttttacagtattcttataatttgaagcataatacgatgtgtaactgctgttattgatacctgtaattgccataatcctacctccctgttattgaaacttaaaataatttctattatattgaacgacttggatatttaatttccgttgatgtaaattcatcttccgccgaaacattgatatgcccactgctgtcaatagcatactctttaccataaacggaaaacgtatctccttctttatatccgatttctatccaatttatatcatttaactgttttatctttgcgtcaacatttatggtctttcctgattcctgcaataaataagtgtgttttcctgctcccgcatctatagaaaagaatcccggagaaatcccgactttctcacagacggacaatacctcctcattgctgtagagatacccccacacactctttccctgtgccagatcagacaggatattgcctgccttacacatttcccacttataatttgttcctttttgatttgtattctctgcaagcaacgattccgaggctgcccagcctatccttccattgttgaccgtccatgtatatttaccgccacttgatgttgtccatgaataataacttttattacttaataccaaagaattatttgcagcacaaatgcctgacatggtgcttgtattcattttcggtactgcataattaggtactacctgtctgctcccattaaggtcaaaggaaataaccccgtactccttaaaatcagaattatatccacaggaaacattctccccaaaattgattgcatccaaaatagcacttgaattattatagtttgcaaaataataagccaattcactgttagaaatattcgcatttttatctatcagtgcagctattgattgctttgaaaagcctcgtgcagcatcagaaatacttaaactgtcctgttttttattatttcctgctccaagcaacatctgtattgctttttggtgtattcctgcctctgcctgctttgaatatgtcaacagctggtttactgtgtttacatctgttactgtcttcatagctagtctccaaaccctttttcaacattaaacgccaaacatatgctgcaatttgtccagcatattatttactctgccttcaacagcttctggctgattccttaattcatacctgcttccatagtaatcatttaaacggtctttcatctcattacaaaataatttttgatctgttttaccatttaaaaactgattgcagataccacttatctctttcttctcatttgtataaaaagctgtctcatctgagattatttctgacttgtacttataagattctgttttgcttccaattccaacaaccatgtaatctggtgtcattctctccatgatggaattacgtgctgaatcattaaaatgaacatattcgtcaatcatgtctgaaaaaccagcttgaaattgctctggaacatacatttcatttactttccttagcccagcttcacttgcacttaacaaaaatacagattcataagaagttcctctatatccctcctgagcattcaaagaatctacatctgctgtcattgcattaatcttctcttttaaatctttcatttcatcttctgtcaaatattcagaagcattttcgtccagccatttttcaaaaacctctgactgattttctgaacagccttcaaacgcactttgttctccagaaatggaagttgctttcaaatctaatttgaataaattttcacatttatattctgctggtatctctcttatctctcccataatagatgaaaaatgcattgtatgaaaatccgataccttattacgagcagtctcaactaactttcttgctgaatcactgattttcacatcatcctccgaaataatattctgaggaacagttgttttcttctcaaccttattttttatcatctctggattattaatatacctatttccttgaactttcatagcaacctccttaagttagtccacactttctatacttctttatctatcttgctcgatgtcaaagaacctgcatctattttcaggtaatctacatcactgtcattgctcaatgaaccaataaaacgatttatatctactgactttctgccactctactctctggtgatgccatccaatgcaccaatttgatattttccttttatcgaatcctcttatgccttaatatcaaaacttgatctatcaggtgcagaaatactcacagattctgctacaaggctctgtgtcatactttttacatcattaccagttacggataaggtataatcacccgtttcttttccttctgccgatttttctgcacgtttctttgcagctttttcttcctctgcttttttagcagctcttttctcttttaccttttcctctttttctctgttctcttttgcttttcgttcagcattctctttcgctattttcccatctggatcatttgtaccagatattgccaccgaaatatttccgttttcatcaaccttataactcagatttgtcaaagtgcccaaacatccattaaccgcacttttggcacaatctggaatggctgctaagttttcctccagatactttgctttttccggatcattcatacacttctgtaaaaatgcacttgaaacggatactgttgtcggaaccccttgcattgaagtcgttcccgtattcacataatggtattttccctgcaagtattttgaataatcatttacattgctataccccgtcttaatctgctctgtttttgtcacaccgggacgtgatgtttttaattcaactgtacttgttgtcacgttgccgtcttttgtatttgtactatccttttcactatctgtttttttaacagtattcttgtaatttgaagcataatacgatgtgcaactgctgttattgatacctgtaattgccataatcctacctccctgttattgaaacttaaaataatttctattatattgaacgacttggatatttaatttctctcagcctcaatatgatatgtaattactatttttatttgtaaatcatagtactaacatcatcaaatcttaatgctcatcaataactgctctctattaggctgaatcattgtatatttctccttaaatgaggtaattgcaccatacattttctcagttaaattttctgggatttcgtccttccccctggttttttgctcctcaatgtaagccgatgccaaagttgaccttgtggtaatttttgaaattttattcatttcttcaccaataattccacgggcatgctgattggttgtctccattgtcacaaagtcatccactgtttttttatatgcagcatctaaattgcttaactcttcatcctttgtaagcttacgaggtccattttcatcagctacatatatttctctggttccattttcatagcccttcacaatttcatcatataattctgcgtatgctttaacataattatttgccttgtcagtaatatttaaggcactttttcctgtatcaacattttgattctgctgtgctgccttcttttgaatttcataactataatcaatatcactgatttttttactcgctaacagttcctttctttgaaccacatcatcatatttttcctgtccactctgctgtatacgattacgataatactccaatccctcattagaaatcgaaagcttcactgattgccccactgtatgtttttcgtttgtctgactatttcctttctgtactttatcagtatttttttccattattgaattcgtattattcatgtaattagatattttcatatcctatttttcctccttaaaacccattatcttagtttcacctcgtggctcacaaataaatctatctataactttatatctactgacttcctgccactttccgccgactcccttgtaataccatccaatgcaccagccggtattggtttacccgctttccatgtaggatcagcggcttttgctgcttctgcaaatgcctgtctgtattgatgttcatattgttccattgtccagcctgctgataagcggtcatctttatccatttttctatataaattgttatatacgctctctcttttggtagtatcaccatttaaagtaccgttttcatttaagaattctttctttgccagttcaaacatttcttcccggctgctctctggaatagaaatgatatgtttataactgtttctgttctcatccgttacagcaagtcctgttaatccggtattcggatcaatccagtctccgtttttgtcatactggctcatcaggttcttaattgcctgaacatttgtaaacattgcaccgtttccattcttcatcatctcactcagtgctgctttatactttttactgtttgtgtcaatccctgctgcttttaattgtttttgtacagaactgctgttcattttggacaactgaatattgttgaccaaatttgtttttgatgttccaaatgttgtttgaaataaaaaaccgtagtccgtaattcttgacataagcgaaacctcccatcattaaattttttatatgtatcatccactttatttttttctatcgacacaccccttctgatattttaccttttctgcaccaagtacgatttttttgcacgaagtaagactctttacaaaaaaatagccaaaaatgctcttttatgaattaaggaataactcagcagcaaatttatttccatcattcttcaatgttaaatctccatcatatttttttatactgctctgaacattcagcaatcctattccaccattttttcctttatttgatactggaaaaccatttctccactttacttcattacaattattttcaatgctgacaactatcatcttatgatatgaaccaatcttaatgcaaatatatttctcgcctttcagcttttctgttgcttcaatcgcattatctaataaatttccaaaaatagttgtaatgtcgattggttcaatgaaattcaaattcacattatctacctttattgttactgaaatccccttttctctcataacagattctttatctgtaagaagtatattcaagatcggattttctgtgtattgaaccggaataagcggcttcaacaactctctgatctttgttgcatattctcctgccgttttttcctgctctgcaccatataacccttcgattgctttaatatgcttatttacatcatgtaatatctgaatggtttgatcatacttttttgcctgggtcaaatagtattcgtattgtacctttgcctgctgctctaatgcgatcaactgcttttcgtaatagttcttttcatctgccatttttacaaaatataaaaggtataaatctgccagaacaatacatcccatgttgactgcacacaaataattttcttctccatttttaaaattctctacaattacactcatgttaatcagactgtatagaagtataattccatacatgatgtaccgtgtctttgaataagggacatcactttttttcacaaacctgtttatgaatgtgtaatacaaaaaaataagtatcacctttgaaaatgttacctcaaggcaataaagcatcgtttcattcacattttttatatctgcggcttgcaaaatgcattgtaaaagaatcactcccaatgattcacagacagacatacaaaatactaatgcttcacattcaataatacgtcttaagggtttatctatatcctcataatacagaacatatactataatccccgtcaaaacgccccagactactagatttaatatggaatgattgagcatatttatacagaatgtaaatattactgtggtagtctcaatcacaatatatacatatctatttcgactactctttttatactttccattcataaactgaaataatatcgtacttattataaaaacatgaaagtgcattacataataccagtaaaatcgtattcatttttcctcctatgaatttctctgcaaaaatttatttacttcttctctaaaatcgttgcttctcctttgtgcaatctgaagttcttttccattatccatataaataataaagccctttattttttcaatatgccttaaattaaccagatttcctctacaattcacaacaaaatcatatggttgcagttcttcaaccagtttttcaaagatacaatcatactcatatgtaatatcagacaatgctatcagtacttttctggatctttttatgtattcaaaatataaaatatccctcagtttcagtttgatcgacagatactcttttccattgctgtcagtcactttataaaaattcttttcttctatggcatccggcagttgattcagaagttccaatatctgcaattccagtttatcatattccaatggtttacatagaaatgaaaatgcatgaacttcgttaatgacctgcatacaatattcttcataactcgtaatatacactaatttcacatctggaaatttttctttcaattttctccccagtttaataccattcagttcttccatcgaaatatctaaaattccgatatcaatacgactgatattttcaagcatttgatttgcagacataaatttctctatatgataagcaatcttttgacttgtaaaaatcttatgcagcatattcactgcacactcaagatctgctatatcgtcatcacaaacagcaatttccagcatattactcaccctcttcctatcttcctactatatcggtaatttttatttttccattaaataaatataaagtactctgcatattatctaaataggctctaaataaatatcatatatatagaaaatgtgccatcatcttgacggcacatttcctatattttccccccaaattatattgctacagtatagaataccattgtctgtccatactatcagcttcatactgatatgtaatcaactgattcatgtcttttaaacccgccatttctattaggttctatcattatattatagttttcatatttttatagtatcctgcattatccataacactattattgccagatgtacccacagtacttacctcagagtccgaaatattataccctgccttaaatgcaagaatatcctccaatccatattgatttttataatccgtcagcatatagatattatctcgtatttcctcatatttcgcattggcttcctgggagttcattattttacacattttctctggaagtccggtaatcttcccattgtcatctacgtttatatcgtcaaatgaatactgtccatttgttgctttctgaatgaactgttccacttcatagtaagcatttactaatctatattgtgtgttagaaatatctgctgtctgaatatatttttcccacatatcatcagcaaaattttccgatatcatattttttatctgttctttgttttcttctgtaatgtccccgttaatcgtaatagttccagataaatctatttcaattttccatgatgtatctggcagttcaattcctttttcatttgctattctttctatttctgcataaaaatcgttttttatataattcgacttctctgctctctcataatcagataaattggcaaatattttcacatatgccatttccgacacacttaactgctccccctttttcatcttatttaataattcttctacactatccgttcccgaatatttttcatcttccggcaacgcttcaaattgcatctgatgtaatttgtcaatttcgctttgatatgttttttcatatttctgctttattgcatttttttcttctgaattatctgcatttgctatttcttgtgagtgctgcacattactacttgaagtatccctgtttttcgtttccgtaatttttattctataggaaccttccccggaatccgatgtcatattggaattttctactctgatcacataatctgatgtaacgcagtcccaattaggtaccgtaagctgtttattaccatgtccatcatctgtcgctattccaatctgattgccatataaatcgtacaatactaaattatatgcctgactattcttgctttccaatgaaatcgttatctctgaagatatacccattttagagtaaaaacttttttgcggataagaaaaagaatagtaatctacatcatattttgaatcgattgttccctctaaataactttcattattatgcaacaatgttcctatatcatatgtactgtaatagcgatctacctgatcatcgtatttcgtatgctgatgataactatcattcttatttgttttggcattttctattaacaccgtttgctcatttaattctttcatcggcgatttaaagctttttgctgcatttcctgtctcatatattttactatctactattccgccacctatataatgtacatagtgtcccatcttatcgtcacctcttggaatccacggatggtataaaaataccatccgtaatttatttatctttctaaatatttagcccactattattccgaaaggaactaaataatccaatgtatctgttatgaatatctgatatacctttggtgtttcaaccgtacaaaatgtcttttccccagatgcaggagttttcatttgattacctttttgttgaccgtacaatgaagatacggtattcagaccagaaccaatatacatatttctgttcctccaatcagatcaaaattttttctatatgactaaacatttttcatggttaacaatttgctcaattcctctatttcctttataggataaaataacttgctctcccagtcccatctcatcaaacaaccatattacgcacacaaagtccaacattgcataaatgaaatatataccgcataaaaacatcctatatttttatatctactgacttcttgccactctcaacagactctcttgtaataccatccaatgcaccagccggtattggtttacccgctttccatgtaggatcagcggcttttgctgcttctgcaaatgcctgtctgtattgatgttcatattgttccattgtccagcctgctgataagcggtcatccttatccatttttctgtataaattgttatatacactctcccttttggtagtatcaccatttagagtaccattttcatttaagaattctttctttgccagttcaaacatttcttccctgctgctctctggaatagaaatgatatgtttataactgtttctgttctcatccgttaccgcaagtcctgttaatccagtattcggatcaatccagtctccgtttttgtcatactggctcatcaggttcttaattgcctgaacatttgtaaacattgcaccgtttccattcttcatcatctcactcagtgctgctttatactttttactgtttgtgtcgatccctgctgcttttaattgtttctgtacagaactgctgttcatttgggacaactgaatattgttgactaaatttgtttttgatgttgcaaatgtcgtttgaaataaaaaaccgtagtccgtaattcttgacataatcgaagcctcctatcattaaattttttatatctgtcatccgctttatttttctttttctatcgacaacccacttctaatattttaccttttctgcaccaagtacgatttttttgcacgaagtaagactttttatgaattgaggaataactcagcaataaatttatttccatcacttttcaatattaaatttccatcatatttttttacactgctctgaacattcagcagtcctattccaccgccttttcctttcgctgataccggaaaaccatttttccactttacctctccgcagttattttcgatgctggcggctatcattttatggtatgagccaatcttaatcgaaatatatttctctccttccagcttctctgctgcctcaatcgcattatctaataaatttccaaaaatagttgtaatgtcgattggtgcaaggaaattcagattcacattatccacctttatggttactgaaatacctttttccctcataacggattctttatcggtaagaagaatgttcaagatcggattttctgtgtattgaaccggaatgagcggctttaacagttctctgatttccgctgcatattctcctgccgtattcccctgctctgcaccatataatccttcgattgctttaatatgcttatttacatcatgtaatatgtggacggtttgatcatatttttttgtctgcgtcaaatagtattcgtattgtacctttgcctgttgctctaaagcgatgagctgcttttcataatagttcttttcatctgccattttaacaaaatataaaaggtatagatctgccagaacaatacaccccatattgactgcacataaataattttcttctccatttttaaaattctctacaattacacccatgttaatcagattgtataggagtataattccatacatgatgtaccttgtctttgcataaggaatatcgctctttttcacaaacctgtttatgaatgtataatacaaaaaaataagtattacttttgaaaatgttacctcaaggcagtaaagcatcgtttcattcacattttttatatctgctgcctgcaaaatacattgtaaaagaatcactcctaatgattcacagacagacatgcaaaataccaatgcctcacattcaatgatacgtcttaacggtttatccatatcctcataatacagagcatatgcgatcacccccgtcaacacgccccagaccaccagatttaatatggaatgattgaacatattgatacaggttgtaaaaatcactgtgacagtctcaaccacaatatatacatatctattttgactgcttcttttatactttccattcataaactggaacagtatggtacttatgataaaacaggaaagagcattacataatatcagtaaaatcgtattcatcgtttctcctatgaatttctctgcaaaaatttatttacttcttctctaaaatcgctgcttctcttttgcgcaatctggagttcttttccattgtccagataaatggtaaagccttttattttttcaatatgccttaaattaaccagatttcccctgcaattcacaacaaaatcatagggctgcagttcttcaaccagtttttcaaaaatgcagtcatactcatatgtgatatcagacaacgctatcagtacttttcttgatctttttatgtattcaaaatataaaatgtccctgagtttcaatttgattgacagatactctttcccattgctgtccgtcactttataaaaatccttttctgctccggtatccggcagttgattcagaagttccaatatctgcatttccaatttatcatattccagtggtttacatagaaatgaaaatgcatgaacttcgttaatgacctgcatacaatattcttcataactcgtaatatacactaatttcacatccggaaatttttcctttaattttctccccagtttaataccattcagttcttccatcgaaatatctaaaattccgatatcaatgttgctgatattttcaagcatttgatttgcagacgcaaattgctcaatatgataagcaatcttttgacttgtaaaaatcttatgcagcatagtcactgcacactcaagatctgctatatcgtcatcacagacaacaatttccagcatagcactcaccttctttctcatttatatatcggctcaatctttattctgtttcaaatctcacctataaaagatatcacatgaaacaaaatattacggtatttcttcaccaaatacaattttttaacacgaaatacgattaaaaaaaagcattaaaccatttacccctgttaatacacaaaagcactgtatctcaaactctttgaaatacaatgcttccctgcattttctatatcgtcatgttgatattattactttactattcccagaatatttgcagcttccttaaatgaataagatttttcccttagttcttttcccggcacctcaccaactacttttctatacttcacctgattggcataccatttttcaaaactttcaaggtcaatcctcatcattcctccgattgtctctgttctgaaaaattttctgtgaatcagccagtaactctctgtcttctttaatccaagcagttttcgcatttccggcactgacatggtgcgacgaaggacctgttcctgctcagcctgatgctgttcaatctgcgtcctgattttctgtatatcattcatagcatccatccgcatgcctccttccgctcacaatataacacgcaagagtcggtgtcataactcttcctacattcagtgtctgtccatacagggtagaaaataacctggttgccctccaggtatccgtcctctctcttatctgcaccgattacctttgcgatggactgcgccaccgaaggtttctcggcaattactaattttatatttttttcactcaaattttgtttccttctttcattttttatttgctttttgatagcataaatgctatcatgtatatagaataaatatttccacttggagaacatatactaatgtacaacattgaattttacgaagattccaatggcagatcagagctttgggaatttcttgaatctcttcgagtcaaagcagctacaaacaaagatgcccgtattcaatacaagcagataagtttgtacatccagctcctcgaagataatggtacacggcttaatgaaaatatcacaaaacaccttgatgattaccttgcccgaaaggaggctgaatgattatgaaaacctggaatgactataaggaacatgtaagaaccgttgatcctgaaattggaaaagacatcgatgaagttgaaaatatttcctccatcgtaagtgccatggtggaacagcgtacttctcttggacttagccagagagagcttgctgctatgtgtggtattccacaatcatccgtagcacggattgaatcctgcaaaacaaccccgaatctcggaacactgcttaatatttttcagcatctcggtttacagcttacagtaagacctacaaaacctaccgtttaaaatcaaggagaatctctgcgaagaggttctccttatcggaatctcaccgaatcatgcctaacggctcgtgggctataccaccagtagggaatctgaccctgccctgaagatttcacttttcttacgtagctgtgttgtagcacaagcattcatgtaatgcaacagacaatttcgttgctgtatggctacctaaaatgaattttaaacaataaaaacaagacctcccattacacttttcagtatctgagaggtctgtatttataaaaaatttaatcgactgacagtccaatttcatttaacgccaaaatgttttcttttacacatagaatttttttatttgctgtatattctcgcctcatatggttgcaaccattcggactccgtttcatgataattgcacaatacacatttttgatcaattttttgaaacatcagcttttcatttgtaaaattcacgattaccaataaacctttaccgtctacttctctttcatatgcaaataatcccggatattcttcgtacatcgggcgaaactccgcctgtctcacaatatctgcatggtcatggtaacactgaatcaaacgcttataataattgtacaatgaatccggatcattcacctcactctgtacattgattgttctataattatcattgcatttaatccatggctttccacacgtgaatcctccattttccgagtcatcccactgcatcggcgttcttgcattatctcttcctaactctgaaaaatatgcaagtacttcctccggatccttgccctgtccgaccgcttcctcataggttcttttcgcccttatatcatccatatcattaatattcttccacttaacattggtcatgccaatttcctgtccctgatatataaaaggcgttccatataaaaagaaatagatactcgccagtgccgatgcactatagaaactaatattttctctttccaaaaatttgttcaggcatctggactgatcatgattttctaaaaagatagcactccaaccgattccgctattatgcgctacatgtgtaaacatttttttcttccaccgttctaccgcatgaatgcttgatttatcattttccccttccatattttcccatccaaaatcgaaaatcatggaaaagtaaccattctttccggcataccgttcaaaagcagcatcgtcaacccccggtgcttcggccactgtcatacagttatatttatcaaagcactgctctttcatctcatcaaggaatgttccgattcccttataatccgtaagtttttcaaccggatatagttccccatcattcgtaggacgactggcaaaacttaagtcttttttgataaaggtaattgcatcgatacgaaaaccggcgattcctttttccaaccaccagtttatcatctcataaattttttgacgcagctctttgcattcccagttcagatccggctgttccttcgcaaacgtatgataataccatctgccatctggtaatctcgaccatacggatccgccaaaattggatcgccagttattcggttctttatcattctccgttgttcggaagtaaaaataagacgcttcctcacaattaggatccttcattgccttctggaaccattcatgctgatccgagcaatgattgaccaccagatccaatatgattttaatctttcttttttgagcctcctctattaaatgctccatatcctcgtttgttccaaagattggatttaccttgtaataatccgatatatcatatccattatccacaagtggagaagcgtacatcgggcatatccataatacatctacgcctaggttttggagataatcaagcttctggataattccgttaaaatctccgattccatctccgttgctatccataaaactttgcggataaatctgatacactacggactctttccaccaattgtttttcattcacaaattcctcaccttactttattgccccttctgtaataccttttacaatgtatttttgactaaacaaataaaagataataataggagccatgcacataaccaatccggcagaagccaaatcccaacgttttgcaaattgtccaaagaacagatatgtttttaaaggcaacgtctgtaagccctgtttattaataatcagcgatggtaataagaagtcattccatgttcccataacattaataactgcaaccgtgactataatcgttctcatcaaaggaagcacgattgaaataaacagacgtattgaaccacacccgtcaattgtagcggcttcctccaattcctccggaatattttttatgaacccatgaaacattatgattgccatacttgtttgaaagcccatatacataaagatcaagccaccacgagacagcaaaccgattttgcttgcaaatccaaccaatggaagcatgacacactgaaatggaatcaacatagaacctgcaaatatcaaaaaaataatcttacttgctttggttttataacgtacaagtacccaggccgccatagccgatatcaacagcaccagaaccgctgtcactaccgtgataagcagcgaattcataaaagatcttatgtaatccagttcttgaaacgcattcttatagttttcaagtgtgaatgttcctttcgccggaaatcccaacacatctgtaaaaatccccttggtcgtcttgaacgaattcataatcaaaatataaatcggaaacaaaaaaatgcatccaagaataagtcctgttactccataagcgatttttttcttcattacatttcaacctccttgcgctttgttataaccaactgcgtaactccgattcctgccacaataatcagaaaaacgattgcctttgcctgtgcaaaaccaaattcatttgctccaaaggcagaattgtaaatgtttaacgcaatcatttctgttgatttgtatggtccaccttgtgtcaaagctaaattttgatcaaacattttaaatgaactcgaaatagataagaataatccgattgtaaacgcaggcatcatcaacggaaggatgatatatctcatgagctgccatgagtttgctccatcaattcttgctgcctccttaaccgattccggtatctgctgaatctgcgcaatatatacgatcatcatatatcccgacatctgccacacagtcaaaatcaacaatcctataaatccggtttccggattcgacagccatccgctaaaggctgcaattcctgtcttttttgaaaaagcttcaaaaatcgatataaaaataaactgccaagtaaatccaagcaataatccgcctatcatatttggcataaagaaaattccacgtaacagcgttgcgcctctaaatttctgtgtcactaacaacgccagagcaaagccaacaaagtttaccaatacaactgcgcacaccgaaaaaagcgcagtaaataaaaaagcatgtacaaatgagtcatctctcgtaaaaatgtcaataaaattttgaaaacctacaaacttaatgtccgagcctacaattccattccagtttgtaagggaatagaaaaatccaatacatgtaggtatgattacaacaatacaaaatgcaattaatgacggtgccaaaaagccccaaaaccgtaatttactttttctcatacttcttctatccgtcctttccaaacaaaggattttacccttatttgaatttccgggatagaagctctatcccggaaccctctttaactcttactagttgttctgttgttttcttaactcactccactgctcgatacaggtctttgtaacctcatcccaatcagcttctccggcaagatatttctgtacttctacaccagccacctgctgaccccatgtatttggagctccactgtatacccatccgttcatggtatttccggaattatttgcatccataattctctgtgaaagtggatcggatgcttttattccatcaaaattatcatatggaggaataaacttacaatcattcacaacaattttctgtgcttccgaatcggtgaacatccaattgatgaagtcttttgcagcagctttctgcgcatcggttgccttgctatgaattgcccaatatcctgatacacctacaaaatacttgccatctgaatatcccggaacagaatatggtaacatatccaatttttgaaggactgccggatctgttgtctctactgctggagctacccagtttccctgcttgatacatgcaacacgttcaatggcaagtccaccctctaatgatgttgtgtagtctacagaattaagatttgccgtattgttggcattggttgtataactggcctgaaaatcaaccattttcttatagtcttcaaagccggttcccggaagcgaatctgccgcatatgcttcattaggagtcttaaagtcatgtgttaaagcaacattagcgtcatggtctcctgcaatccataactcctttgtcgggtattccataacagcttccagattcggatatttatccttcatctcaccattatcgattttctctttcaaagtatcaaaaccggccttcatgccttcgaaattcatcatagaatctacagaaactccagcatcctcaaacatctgcttattaataacgaatccataaccttccatgtataacggaatggcatatacttttccgtcttttgtaaaagtatccgttgttccttttaatgcgtgctgcataatatccagatcagaaacatcttcaataacatctccgtaatctttcatgtccgaaaaaccacctacagaaaagattgttggtggatccgactgcatctttgctttcattgatgcgccaaaatcatttcctgtgacagcttcaagattaatttctacatttggatgatccttttcatatgctgcaattaatttcttgtatccttcatttgcctcaatcttactctggaaaattgtaatctttacattttttccactgtttgctcctgtcgaggtatctgcagaatttccgcatcccacaaataatcccccaagcattagcactgtcattccaactgctactaacttctttgctttcatatatattcctcctttttgtgaaactgttccatatttgattaaaaaaaatttttcatctatggatgcctcgttttgtgccacggaactgtccacatcatttgtggaactgttccatatctgtaatatacactatgcgtaactatattgcaacataaaaatgcagtttattcacagattcgttactatatccaaaaatcatcttgattttttattaaaaatcactagaaaaaggagactatgaagaaaagtctgtaaataataatcttctatgataatgattgagctggaagcctcttcttgccataataaaaggcctcctatgatttatattttaccatagaagaccttgctgttattagctatttacagaaaaagtttcacacactcctttgtgccaatgctctccattctacaaagtatcgccctttttatattttacaggaaccaatacttcccttttcttaagtggttgatcattgatcagtttaataagcatattcacactttcctttgcaaccttcttcgcatcctgtacaattgaatcaatcgaatggtaattgaagtccgtgacataagttccatcataagccaatatttttttgtttttttctgtcttgaggaaggcggctgcacacaagtccaaagccataattccatcaacgtccggatattgatccaacaatgttctggtacgtttcatacacaattgatagtttataacttcctcccattgaaaagattcaatgataacctccctattatgcttctccatcacatcgataagggctctcgcgctatcggcagaggcaagttccatcctggtcggatcactaaagcacatcacttttttacagcctttttccaaaaacaattcgcccgctaaaattcctccctgatgatgatccgatgtcaccagcgggattcccggtataatccgatccagtgagataattggtttctcaatattcatataatattcatcagaaagaaacgcagatcctacaatcagtccatcgaacagattacgttccaatgtatcaagatattctctttccttgtcctgatttcctctggtattacaaataaccacattatatccgtattgatctaattctgcctcaagataattccaaagagttgaaaaatacggatggataatatccggtgtcataacaccgataatacccgttcttttcttatacagatttctgatccactgattaggaatataatctagctcctctaccgccttcttaattttgtttttgcttttctctgatacatatccgctaccatttaacgctctggataccgtgctgggtgctacatgtgccagctttgcaacttctcgaatgcttgccataatctcttctcctcacttgtgtaattgcaaacgaattgcccttatattcccctttatcctcttaattaaatccgacaaccttctgcgacaatcgataagtcgcaaccgaaatcttgcggcctcccttaccctgaagattcatggtctgtcccataatgccattgcgtagttgctggaagattataatatctttttccttaatatactgaagttttattttattatacacctttttgtccatggagtcgaactatttttacttaacagtcagcagttatactctttgtattttcgtataataatcatataacttataaacaataaaacagctgcgctggtccaggcacaaatttccgcataaaaaattccgtcttcaccgatcagttttggtaacaataatgcaacactgacacgcatcgcaaattctgcaatgccactggcgaggggaatcagggtattacccagaccctgaatcgccgaacgatatacatacagcagatacagtacccatagaaaaattgccataataaacaaatatttatatgcaatgtctaacacctgtcggatctgttcctgttcgccggatacaaacagtgacaatatattgcgtccgaataacaccatcacacctgagatcacaacagcagtaagcaatgccatataagttccgctatgcacacctttccggattctctgatatttctttgcaccaagattctggcctacataggttgtaattgcatatccgtatgaaacggcagccatctctaaaactccatataatttgtttgatgctgtaaatccagccacaaacaggaatccaaatccattgactacatactgtactgtaagcccccctacagagatgatcaaattctggattgcaagaggagtcgccactttcaaaagccgcagactcattgccggctgtctgtagaagtcctgtttttccagtcggatatccggaattttccgtaacaccatcagacagtacagggctgaaaatccctgtgcgatgactgtcgccactgctgctccggctacaccccagccaaaaactgccacaaataacaggtccagtcccacattgatcaacgctgctacggtcattgctatcagtggagatctgctgttacccagtgctcgaagaatcgctgcaaatatattataagccgctatgatcggaattccggcaaagatcagccgaagatatagcattgtcaggtcaatgacattatccggtgtctgtaaaaacaaaagaacatgataaactgccccttcacttaccgcaagtacaatcacagaaagcagtgctgtcatgatatagcttttcgccaccgcgcatttcagattttctttttcccttgctccataaaactgagctaccagaatagaaaaaccctgtgtgatacctgtcatgataccgaacactagccataccagccagtctccggcgcctactgccgccagtgcttcaacccctaccacctgtccgacgatcatggtatctgccatcgtataaaactgctgaaagatatttccaagcatcagtggtatggcaaaagtaatgatcagttttccaggtgatccagtggtcatatttttttcatttgttcccataagaatctcctttttcttttcatccttgtccgattattttacataggactctgccaaaacgcaatccatcacagaactctttggtatatcgtcccaccagtgtttacgaactctgataagggcaaaaacaagaccaagcgcaacagtattgatgtttacacctctgttggctatatgctccgcattgactgttgggaagctgaaaaggacttaaaaaccacaccaggatcagactgtgcattaaacccactcgccattgatgaacctcttgaatatgcaagattatatcttgatggaaacttgcttgatgtatcggttagtcaaagtgtctatatcagaaccttttatcgttccttgatatagacactttttttaatagtcattcaattaactaattgatattttcgccgtttgttgaaataacttctttataccactcgaaagaatctttctttcttctggacaagtctcctgttccatcgttatgtttatccacatagatgaatccatatctcttatccatctcaccggttcctgcactgacaaggtcgatgcatccccatggtgtataacccatcaaatctacaccatcttcctctaccgcctttttcatttctgaaatgtggtgctgcagatattccacacggtatggatcgtgaatgcttccatccgcttctaacgtatcatatgctccaaatccattttctacaataaacagtggtactttgtagcgatctgtaaaccagttcaatgaatagcgcagtccgatcggatcaatctgccatccccattcacttgcctttacatactggttctttatacgatccttttctccacggtaatcatattccggattgtctggttctgcttttgtacagaaagacatataataactgaaaccgatataatcgacacagccctgttttaacactgcaagatcttcttctgttacgtcgatcttaaggtcttttctttcccagtatttcaaaatatttacagggtattccccttttacatgcacatctgtataataatatcttttctgcatggctttttcagcctgcagtatatcttccggacggcaggtagccggatagattgggcacattgcgatcatgcagccaatctgaaatttcggattaatctcatgtccagcttttatcgcttcggcactggcaaccagttcatagtgagatgcctgatacatcaattcttccgcattttcttctggtttaattataatcccggaattagcataaagcataaatccatcaccgatatctgcctggttgttaatctcattaaatgtcatccaatattttactttgtctttatatcgctcaaagcatgttactgcaaatttcacgaagaaatcaatcagttttctgtttctccatccaccgtactcttgtacaagatgcagaggcatctcaaaatgactcagtgtgatcactggttcgatcccatatttcagacattcatcaaacatgtcatcatagaattttaatccggcttcattcggctgttcttcatcaccatttgggaagatacgtgtccatgcgatacttgtacggaaacacttgaatcccatttccgcaaataagcggatatcttctttatagtaatcataaaaatcgattgcttcatgattcggataattctcgccttttagtatttcacctgttattcttcttcttgtatttacatctccgccggttacaacgtccataatgctcaagccttttccatctcgatcataggcaccctccagctgatgggcagcaactgcgccaccccagagaaaatcttttcgaaatcccattgttatttccttcctgttgtcttaattactttgtataatagcgttgggggcttttgcccccaacttttctgtttctatattcaattacatcttgatgattatttctcatcaattctcttatacagtgtaatgaattcatctgcaagaatgcggaatgcttctgcactcataagctgatcttctgcatgcatcagaagcatgtatccattggaaatttcaccatttgcatccattgccaaaagatctgcatgaacgttgtgtccaagtgaaaaggcttcatctccttgtttaatcagctctgctgcctcatcatattttccttctttcgcacaatggatcgcattgataaaatgtgttcttgctgtacctacatatgtgatgatctgaaaacatgacaattcaaatttttcgttcatttttttctcctatcctgctattatttttattctgattttaccagtcttcatcctcatcttctaccggctgattcttctcctgaaccagattcatcttgtcaaccttcttaatgaatggcagataaacgaagaatgaaacacaaaggatcactaactgaagtaaagcacttttccatcctgctaaaaggaatcctgagataatcggtggacaagtccatgggatctgtgttgctccatataatgggcagattcctgtatacagtgcaaaatactggattaaacatgcgatcacaggcattccaataaacggaattgcaagcattggattcataacgactggagcaccaaacagaattggctcattgattccaaataatgccggaataattcccaatttaccaagtgctttcaactgttttgattttgcaaagaagaacatatacattacaagtccgattgtgatacctgcacctgttatattgataaactgatcataaaactgctgtgttacaatatggcctccgtttgctattgtaagttctacaccactgtcaataatagcctgatttgcaaggctgtttgcctgtaatagtcctgtcatgattccaccaactactgttgaaccatgaactccgaagaaccacaggaatggtcctgtaaagcacatcagaactgctccaccaagggagtctgtcattttctgaagtggtgtctgaacaactttgtaaataatttcaatacctgttgtgtcgaatccaatagaacagataccgtgaattactgcagcccctgtcaggattacgaatgccgggattaatgctgagaatgcatttgttacaccttccggaactccggccggcattttaatacgtatatttttcttcaagaaccaacagtaaataggcggtacgatcaatccgacaatgattgctccaatcattccctgtcctgctgtccatgtcttattaataattccactaacaacttctccaccttctgttgttatggacgaaggcatcagaatcaagaatgttgccagtgaaataattccacagttgagtggttcctgattttccagtttcgcatagctatagctgataccgataactgcaatcaacgcactgatggagaatgttgcgccacatacctgatctaatactggtttgattcctgtagactctaatacatcgacaactgcctttaccggaaagtttgacaggatcaggaagattgatccgatgatcagaggagacatggaagtcaccataccattttttattgactgtattgcctttgtattaataaacttaaggattacagggattactttttcgttaaatttctctttcatttgctactaccctttgctctgttttttgctttaaattgtgtatctttgttttctcttatttatttttcgcaagcttatatgcaaatttcaaaacattcattccattgcacattccataatcctgcattgggatcacatctaccggaaccccttttggatcacagatctcttttgctctggcaagctgatatcctacctgtggtccgagcagtgctacatccacgccttcaatcacgcgttccatctctgtaaatggatatgctacgatatcaacatcttttcctttttcctttgctgcctcttccatcttctttacgagaagactggttgacattcctgctgcacaaaataatcgaattaccatgattgtttcctcccttatttttttctcatttgctttgatggtgctagtataacaagtatttttcgttttgtcagtactttttcctgtttctggtttctgttccatatagacggaatttgttacataaaaaaaacagggcattctactttattgtgtaaaatgcactgttttccttttccttttttgtatattatgatactttttagtgtattctgttttttttgttacttgtctggttactattcgtaccattacattctacaaccttaatgaaataagtcttccatatcattttaaaacagatcatctgtatcgttatggacgcccttcaattctcttccgattaattccaaaataaaaacgactgccatctgggatgtcagatcataatcttcgtcttgtttatatttatactctgaaacataataatttatattgcagtcactcatcttcgccaaagaacagtttgccttatttgtaatagatatcaggctgctccctcttcttttcaacttttctgccaacatcagtgtctgttccgtctctcctgatacagacaatgcgattgtagctattctctcaccttttccacgaaatactggcgtgaacggatcatcaatagcaaatgaaaaccagcctacattattaaaatatcttgccccatactttcctataaaagaagaattccccacacctacaaatataattgacgatgcctttgtaagtaacttcacagcttcctggatattctcagcaaatgcctgtgtctgcacccgttcaaagaaatctttaaccgcagtaagatccatattgattttcttcttttccttgctgctgacttcctgttttaatttcaaacggaattcagaatatccctcgcatcctacctttttacaaaagcgaaggatcgtcgttgttgaaacatgaaccgcctctgccagctcgcgtactttcatatatactactttctcttcattgctgatgatgtaattatacacatccatctccaactgattaaaggattttatcatctcatgcgtaaacatatgaattcagttcccttctgtttttctctctattccataatcatattatgttctttagaagcagtgtttatcccgcattttaatcgtgtttttcattacttcatcgtcttcgccagtgaattgagaaatgcccacatctctggattagccaatacttttgtcagaagttccgaatcgacttcatcagcaacgattataaatagtaaacctgctgactcctaagatttcctgtaactcttgaactgtataacatcttttttctgacatttctttattctctttttgaaatatgaaaaaaacaatattatatctcatttccgatggtattgctgtacattgcctgtgcattaacaatttctgattttgaaattgtgtctgttgtaacaatgcttatctggatcagtattccagctcttgctatatatatacgacatgatttcgggcatgtcaagagcagacgtcaaaaacgtccttcatttctatctccacaactttttcatcatggtctctctgtttctcactacctatattcatgtttgacctccttttccctggactaaaaaaaagcccagactagattttttgtaaatctaatctgagcgttttatatctctcaggtctgatttctcagacaagaaaaccaattttacagatttttccacccaaaaatgaaaaaagcagtaatgaattttcttaatcattactgcttcaaacaactgttctcagggggaatcgaacccccaactagcgcttaggaggcgcttgttatatccatttaactatgaaaacaaatgtatattacaaacaaatactaccctgcatccagatgtttcctttgaaacgtctgccaaccatcggctcaccgatgaggtcatttttgtttatacacacgctaaatattatatcattacatgatacttttatgcaatatattttttcatttgtaatgatatttttttcttctgttaactcaataatatctcccagcacgctgtactggtcactttcgatgccatatggcatgaaatatgttgttacgattgaaagaatatcctcgttttggattcttctcgtaatggatgagtataaatctatatcttccattgtgaggctttccatagcgccctcatcgccatccctggcctctgcaataagctgctttctatcttttttgtctgaatcaactgtatttaatgttttagcctttttttgtttcattggtagcaaaatacagccatcaactgatagtcctgagagcactgctccctttgcccttacctctatgtttatgtatgccttctctgacagataatcacacacattctgcagataaaatataagtgttacgccgagattagggtcatcacatacgcctgcatatgattccttctctgagtgcttttcgatatctattatctcatttgtagtcttttcgcttcccgtgaaatacggatagtaataatctatgtcaaagctatcatcgtcattgtatattcctctgactgtaattcccatattgggtgccacatcacatgacagctcggcaaattcattgccctcggaatcctttgttacctttagtttttccggcttatcaattatattgttaattacctcgtttaactgtttctttgttatatctgaaaatcctattgctctgaggaattggtgcattacttatttctcttttctttaaattacctgaagaattgaaatgtttttatcaagcatgagattcaatctgttgtgaagcatcaatttgccattattttcatttccaaaaatcatgataataggattctccggatctactgtctgggaaactactactccctcttcttcagcattggtctttactgttgtaccgacaggatatctggctattgatgatagcaggcacttaataattttgttatcatatctgccgccatcattttcctttatctgatttatggcttcctgcacacaaatacgcttacactccataccgcttatcagcgaatcaaacgcatcacatgcctgaattattctgcattccagttctttattcttttgcttcataggaaaacctgtgcctgccatattctcatgatgtgataaaaccatcttcattgatattggcgctatccagctttcctcatccaatgccgaatatcctaaaatggtatgctttttatattcaaaaagctccgcaggatttgcattggaaaaatccctgtttttatatcgtgtgacaataaaacgcagcccgatgtcatgtaataaacatcccaccgctatgttatactttcgcttttcgtcaagctttagctttcttgcaacaagtactgataaaagtgtcaccatgactgtgtgctcatataagtccgaattacgctcttttatatcaacaatcacgtcatatggcatatcatttatatcatggacaatatcatttgcgattatttcaaattcctttaaggatttgccatcatgatatatatggctttccatcagtctacgcacttttttcacgtatttgtcgaaaatagccgggtctactatagaattcggactttcgtaattctcatacggatcctctaccatcactgattctattccaagtgactctataagtggcacataatcaggcttaatccttgtgccatttggtattaaaatatcatttttttctgttagtattggttccgcaagtacttcaccgccaactaagctgctgactgcttttatcctcataaactaaaacaccccattgttatttttctgcaggcatatttgcctccttggccatattcaacgcttcctgctcttcatctgctaaaacaataatggaatttccgccaacaatctccttgatgtatgtataacagccctcacgactgtgaacggcattgagtacaaagccatcatcctttccatttaacatggcaagtgaaaagcttagctttccgcccatctcattgaatgcatcatacttcacaagtcctaccttctggtatgaacacttcatgttagcaaataattcttctatattctttttgattgatgagtttgctgcaacaagttcatctacctcgtcaagtctcttgataattgtgtcctccaatgactttgcagtttttccactcataaacactttgtatctttttttgagtttaccggtctgcaccatatttataattatgaggatgagcagaataattaccactcccgccaatcctaatataatgtagtcggaatcgaatcctaaatattcagaaatcattttttactcctatctatattgtcgtacattttgcataaaatttaaatagtctctttgtctcattttctgtatgattttattatttcttttcattaaatatacaaaatctaaatactatctaattatttctattgattttggactgaattgagcatgtttactattctatccagctcatcatgagaataatattctatttctatctttccggaattttcatttttcctgttgattagaacctttgttcccatattctttttaagcttttcctcaagatccttgtagattgcttccatctgaggattaaccggtttttcggactttgtctttttcttgttcttctgtaatgatttaacaagcttctctgtatcccttacacttagcttttggtcgaaaatctgctgtgctaccacatactgctgattctgatcttctattccaagtaatgctcttgcatggcctgtagtgagcatttcatctatcaccatctgctgtaccttttcatttagcttgagtaaacgcattgaattggtaactgctgttctgctctttgatactctctctgccacatcatcctgcttcagtttaaattcttcaagcagacgcttgtatgccaaagcctcctcaattggattcaaatcctctctctgaatattttctataagggagatttccataatctgctgattggtcaattttttgattatgacagggacttcctttagacctgccagctttgctgctctccatcttcgctcacctgcgacgatttcatagtaatcatccctttcctggcaaagtaaaggctgtaaaatgccaaactgttttatcgattctgataactctataagtgcatcctcatcaaatttctttctaggctgttctctattaggctctactttattaatatctatcattacagcatccgctgcatgattgctctttggttttaccggctttgataccttgtctgtaattaatgaatcaagtcccttacccaatcctttttttgccgccatactttcttaaatatcctttcttgctattatttcctttgccagatttctgtagctttctgctccggccgatttactgtcatacatatttatcggaataccatatgatggtgcctcagctaatctgatatttcttggaatcattgtattgtaaatctttgtatccagattttcttttactgtctctacaacctgatttgacagatttgtcctgacatcatacatggtgaaaacaactccctcaatctgcagctctggattaagtctctcctgcacaagattgattgtatgaatcagctgactaagtccctccaaggcataatattcacactgaataggaacaagaactgtatctgcagtagtcattgcatttactgtcagcatgttgagtgaaggaggacaatctataataataaaatcatagtcctcttttatgtaatcaactgcactctttaatatatattccttatcatttatgcccaaaagctcaatctctgctccggccaaatttacatttgatggaatgacatataaattgtccaccaccgtattttcaatactctctgcaattgaacactcatcaagcatgagattgtataccgtattctccacttcgtccttatttacaccaaggccgcttgtcatattaccctgcgggtctaaatcaattgccagcacctttttctttttttcagccagacacgctgccaaattgatagaagtagtggtctttccaaccccacccttttgatttgcaactgctataattcttcccattataaatcctttcgcaattaacttaaaatttctgccgaatcatcatatttttaaattgtaaattgaaatcttacacactcaaattattatatcactcttaactgtataatgctataaaattccactatgtatgcacattatttttaataattgaaataattattcatccaattcattttttattttgctaaatgcaactatacattcttgcccatttcatatactttatttaaaatatcatgcatatttttcacatcatcagtttttcttgtgtcatacgcaaatataataccgccctcttcacttccattttctccaaagcatgaaatatactgtctgaaacatttaatcatggtttgtacatttatttcttttcttgtagctgcagcacttaataaatagaaaatcttcttatccatactatcttcaattgcaaaagttctgtcaatcattcttttcatcaaagagggccaggtataaaagtaaaccggacatgctaaaacaattacatctgctttatacatttcatcatatatttcattcatatcatcgtcttgaacacattttcctccattttgttggcaaatagcacaaccactacaatctattattgttttatccttcaatacaatttccgttacagcattatgattttcaattgcgcctttggcaaatatatcagccattgttgcagtatttccttttgtccttggacttcctttaattattaaaacatttttattcatataaattatgtcactttctatatcctttatttaaatttttaatcagtctaattattaaaacttagctttctcatattcactcattatatcatttaaatgtttcacgtgaaacattcctattttatcatttaatacctcatatttgtcactaaatattgtatttgatatatactatcatatatttccgaattacataataattgagattataccacatcacataatttaaaacacaaaatattaacctatacaatataaaatcatacattattcattcttaaaataatatactatatgacatttattatacatccacacgtaagaaatacgtcatactgccaataaactatattaaataatcaaaaaggaatgtttcacgtgaaacattttgtataattcaatatatatgtatagtaaatccacaattcaaggaatccgtcatacatatacatttcaaacgagtctacgcagtaacttagagtatgtttgaaatcacttctatacatagcaacgctcgtacacggatatatgagtgagtccatactaaactacgatggcaaatattgacggtggcgtactattgtctcaacctatatttgatttcttacatactcttggttacggagtaaaatgagtgcggaatgtatatgtatgacggattccgtactactgtcaataaactatattaaataatcaataaaggaatgtttcacgtgaaacattttgtataattcaatatatatgtatagtaaatccgcaattcaaggaatccgtcatacatatacattccaaacgagtctacgcagtgacttagaatatatttgaaatcacttctatacatagcagcgctcgtacacagatgtacgagcgagtccatactgagccacgatggcgaatatggacgattacatactattgtctcaacctatatgtgatttcttacatactcttggttacggagtaaaatgagtgcggaatgtatatgtatgacggattccgtactactgtcaataaactatattaaataatcaataaaggaatgtttcacgtgaaacattttgtataattcaatatatatgtatagttaatccacaattcaaggaatccggcatacatatacattccaaacgagtctacgcagtaacttagagtatgtttgaaatcacttcaacacttagcaacgcttgtacacggatgtacgagcgagtccatactgagccacgatggcgaatatggacggttgcgtcctattgtctcaacctatatgtgatttcttacatactcttggttgcggagtaaaacgagtgcggaatgtatatgtatgctggattccgtactattgccaataaactaaatcatatattagaagaggaatgtttcacgtgaaacactatattttattatttaattctagagtattataccatagaatttttatagtacattcacagcgtaaggaatccggcatacatatacattccaaacgagtctacgcagcaacttagagtatgtttgaaatcacttctatgcatagcaacgctcgtacacggatgtacgagcgagtccatactgagccacgatggcgaatatggacggttgcgtactattgtctcaacctatatgtgatttcttacatactcttagttgcggagtaaaatgagtgtggaatgtatatgtatgacggattccgtactattgccaataaactaaatcatatattaaaagaggaatgtttcacgtgaaacattcctctaacaaaattccaataaaatataaaaagtatattacataatctgaataatgttgttacggattgcaaataccgcagcctgtgtacgatcagtaacctcaagcttcttgaaaatacttgaaatatgattcttaacagttctctcactaatcttcatttccttagcaatatctctgttaaacttaccaacagccatttctttaagtacttccatctctctcttagtaagagcatctatcttaagctcatcctcattcttctgaatcatcttagaattaagagccggaataagactaggctgtatataagtctcgccatcagcaatagtgaaaatagcctttttaagctcagcagactcagaatccttcagtacatatccgttgattccgatatctacagccttcataagatattcagtctcattgtgaacagtaagaacaagtacctttaccttagactttctgtcctttaatgcttttaatacctcaagaccattcatctttggcatattgatatccaaaagtaatacatcaggtctaaaagtctttaatttatcaagacaatcctcaccattctctgcctcagcaataaccttgatatcaccgtcgagctccagcagatttttaagtccctctctgatcatagaatgatcatctgtaatcataatgttaatagccataatttagtcctccttatttacaggtataattaccttaactatacacccctcaccgggttttgatgaaatagatattttaccggaaagaagataaattctttccttcatcatagataatccaaatcctgaattatcatctcgggtaaactcaggaatagcagatgtatcaaaaccatctccatcatcctttattgtcaaagtaagtgattttggttcatactttaatgaaacattaatttctctggcatgaccatgcttgatagaattactgcaagcctcctgaatgaccctgagtaaggttagtgacacaagactgtctaccatgtactcatcaccggatgtcttgaaattgcatcttatattatttgaattgcgaagcttatcaagcgcacgctcaacagtaatattaaatccaatatcatcaaatgacataggtcttaaattataaatcatatttcgaagctcattaataatatccttcagtatctttccctgagacgtgagctcaagccggcacctgatagggtcaacatccataagtttaagacaaagctctgtcttgtgagtgagtgatgtcagactctgtacagtagaatcgtgcaaatcacgggcgatacgctgtctctcactctccacagtctgtaaaattaccctcttaaaagcatcactatcctcttcgttgataacatcagatatggcctctgaaatttctacttcattagttgtctcatcagaattatacactctgataacactgttgatttcatcaatcttgcaatcaacatcagatatctgtttgtgtaaagactttatctgaggctcaatcagcttctgctcttccttaagttccttaactttactcttattatatgaattgatttcacgtggagtaaaagcctcaaagctttcatcggattttccttcaagcatctggataatcttgatattttctttaaaatgattctcagcggcagtaagcttttctataagcgcatacttgctgtcataaaattcatctcttgttttctctaaatattttttaaccataatcaccgaacatttgtttgtacaattaatttatctacaatataattatatatcatttttactatatttaaaagcaattataaaaaataattgtataaaacttcttttttgttataatatagttataagaatacaaaatcaatatatcaaatttttcagataaaaacaaggaggttataatatgaaaaaaagtacaaaaaatctgctttttctcacatctgcagtgattgccggaatgcatatatacaacagagttgtagactctaatgccgaaaggaaaaatgcactcaaagtagacaatggccactactacaaatggaaagaaggaaatatcttttatacaaaaaccggcaccggtgagccaatacttttaatacacgacaccgactccggagcatccggtgaagaatgggctaaagtagctaaaaagcttgcaaagaacaataccgtatacactattgatttgcttggatgtggccgctcggacaagccttccatccaatatacaagctacatgtatgtacagattatcacagcctttgtaaatgacgtaatcggaaagcctgttaacgtagctgcaaccaatctatcaacagctcctgtaatcatggcaaatgctctgtcaaaggatttatttaataaaatcatacttataaaccctgtatcattgcaacagcttaaatgcatacctgacaagagcaccaaatttaagcagaacataattaatctgccaatcataggtacatttatatacaataagcttatgagccctatcaaggtagatttactcttcagaaataaatttatttcaagaggccagctcatatcagataatatgaaggatgcatactatgagtccgcacataaagggcaaagccgcggcaaatatctttactcaagcattttatcaaactacattaatactaatatcgcgcccgctctcaagaacctggacaaggatgtatcaattatagcatcaacaggaataaaaaataatatggatgttatcaacaattaccataagctaaacagtaaatgcgacatcatccatattgcaaatgcaaagctttatcctcagttagagttaccggagaagacagcttcaattattaaaaaaattgttactaactaattctatactttaatctaaaataaggcaccgcctataactattcttcaacaattataacgattttttacaatggtttctttgaaggcagtccggcttttctcggatacttgttgctcgtattcataaccttatcaattatgacaaaagagcgatgattatccgagtagccaaactgctctattttattcagctttcctcccaacagataaatggccgactttgcatctgccacctcgctctcgcactcacctgatttatatgacacaaagcagcctcccattttcacaaacggcagacagtattctgaaagagtagacagatttgcaactgctctcgatacacaaatatcataagctgccctgtgttccttatctctggcaaaatcctctgcccttccatgaactgcttcaatattcttgagctcaagagcttcaataacttcatttaaaaacccaactctcttattaagtgaatctaataaagtaatcttaagctgaggaaaagctatcttaagaggaataccgggaaaacctgctccggttccgacatcaatgatatttttttccgcgtttaagtctaacgtgtggcacaaaaataagctatcgaggaagtgtttctctattacctcatcgaaatcagtgatggcagtgaggttcataaccttgtttttttcgataagcatgtcataatatagctcaaattgctctaattgtgaattatttaatgtacatttaatttttgataattcatcagtgaagtgtgtgaaatcatatttcatattttattctccatttttattgctcagtgcttgtattatccgggtttaacctagaaaataaatcaggatttgagtattttagttgttccagaaataccagtaaaaccgatatatcagcaggtgtgacacctgaaattctggatgcctgacctatactaagcggctgaaattcattcaacttctgctgtgcttcaattctcagacccgaaatagtattataatcaaaatcagtaggtaacagttttttctcaagcttcttaaaatgagagacctgcttgatctgtcttgaaatataccctgcgtacttaataagaatattaatctgttctcttatgtcatcagataacttaggtctgtcgggatctatcggagcgagcttgtcataatccagctcaggtcttctgataagctcctctagtgtggttccgttgctcagctctatactgttgtatttcttcagaatctcctgtacatcagcccttgcgccgatatttacatgcgagactctctctatttccttatcaataagctctttctttttacatacatagtcatatctttcctttgaaatcagaccaacctcgtatcccttctcggtgagacgcaaatctgcattgtcctgtcttaaaaggagacgatattccgctctagaagtcatcatgcggtaaggttctctatttttcttagtgaccagatcatctatcaacacacctatgtacgcttctgacctgtcaagtatcaacggctttttgccaagtatcttcattgctgcattgatgccggcgataagtccctgacaggctgcctcctcatatccggacgaaccgttgaactgtccaccactgaacagaccatgtattttcttaaactcgagcgatgcatatagctggtttgcattgatacagtcgtactctatggcataagcgtctcttactatcttcacattttcaagtcccggaagagtgcggtacatctcatactgcacatcctcaggcatagaagatgacattcctccgacatacatctcgtttgtgtttaaaccctcaggctcaataaatatctgatgtctttccttttcagcaaacttaaccaccttatcctctattgaaggacaatacctaggacctgttccctctatgatgcctgcataaatcggtgaacggtcgagattgtttctgataatctcatgggtcttattattcgtatatgtaagccagcatgaaacctgatcaatctgcacactttcaggatcggttgtaaatgaaaacggcactaccctctcgtcaccgaactgctcctccatcttggaaaaatcaagacttctcttatctacacgcgctggagttcctgttttgaatctgcgcatctcaattccgtgatctatgagcgactgagtcagatggttggctgccaaaagtccattcggacctgtatgagtgatcatctcaccggttaagcatctggctcttaaatatgtaccagtacacagcacaatcgccttacaatgatataaagctcccgaagtagtttttgcaccgactatattattattctcatcggtaacaatctcagaaacctcaccctgtctgatggtcagatggtcggtattttgaagggtttttctcatttccatactatattccgctttatctgcttgcgcgcggagagaatgaacagcaggtcccttcgatttatttagcatctttgactggataaaggtcttgtcaatgttttttcccatctcgccgccaagtgcatcaatctccctgacgagatgccccttcgagcttccaccgatattcggattacatggcatgagcgctatactgtccacgcttaccgtgaaaacaatagtctcaagtccaagtctggcacacgcaagtgctgcctcacatcccgcatgtcctgcaccaactacaacaacatcataattttcttcaacaaacttactgcacataactgcctactttcccatacaaaatttactgaatatctcatccatcagatcatcctcaaccgattctccgattatgagtccgagtgactcatacgcactcatcaaatcaatcgaataaaaatcctccggcatatcatcatcaatactgttcataacaagcttaagactttccttagcatctgacaatagttttttatgcctgatatttgtgatataaatctcatcattgaatgagacctctccatcaaaaaacatttcctttattgtatcagaaagctcatctattcccgagctttcctttgcagaaaccgaaataaccgttttatccacaagcttttttatatcatctgccgacacctttgaagccagatccgacttatttagtaaaatgacagcctttttatccttaataaaattgataatatcataatcattatcatcgagtaccactgacgaatcaaccacatatatgattaaatcagcttcattggcatgctccatagcctttttcacaccaattttttcaacaacatcctctgtgcttctgatgcctgcagtatcaacgagatttaaggtgattccaccaatattaatctgttcctcaagcacatctctcgtggttccggctatatccgtgacaattgccctgtcacttcctacaagcacatttaaaagagatgactttccggcatttggctttccaatgattactgtgtttattccttccttcagaatccttccattatctgaggtttttaacagactatctatctccacatactcgttatccacaattgcacgcagcttttgtggataaccatccagagaaatgtgttcggggtcgtcaagtgccgactcaataaaagcaatctcatgcaaaagctgctctcttatctgcctgatgcttccgagcacggctccgcctagctggcttaaagagcttttgagcgcaaaatcattttttgaatttattacatctataacagattctgcctgggataaatcaatcctgccgtttaaaaatgcccttttggtaaactctccgggctctgccggtcttgctccgtttttgattactgcttcaagcactctcttcatcacatacacaccaccgtggcagtctatctccacagtgtcctccctcgtgtatgtattgggagccttcatcaaaagcaccataacctcatctattttctcatcgccgtcatatataaaaccataatgaatggtatgtgactgacaggcgcttattttctttttattattcttgcttttataaatcctatctattaccgaaagtgcatcatctccgcttatcctgataattccgattcctgacggagacatagctgtggcaatagccgctattgtatcattttgcatatgaaattcctcaaaaattctaagataatatatattcaaaaaggatacctgaaaccagatacccttttaatgatttatatctattatttcttaagtgtcacaacaacgtgtctgtaaggctcatcaccctcgctgtgtgtttcaacaaatctatcattctgaagtgcagaatgaatcactcttctctcaaaaggattcatcggctcaagagaaacaggtctctttgtacgcttaaccttgaatgaaatattcttggcaagattctcaagtgtctctcttcttctctttctgtaatcctcagtatcaatctttactctgtagtaattctcagactgcttattgatagcaagatttgtaaggtactggagtgaatcgagagtctgacctctcttgccgattaaaacgcccatctcaggaccgttaagctcaacatcaacatttctgttgtcctcatccactttgatatcaatagtaacctcaagcttcattgccttaaacacactgtcaaggaattcgcgaatctcatcctcaacacttgcctcggcctttttaaccttgatgacagcatcacggctgccaattccaagaaaaccattgcttcccttatcaattacctcatactcgagcttatcgcttgttgttccaagtttaatagatgcctctgtcaaagcatcgtcaattgtttttgcagatacttcaatgtattccactattttctccccctatttgcgtgaattgcgttcattaaactctttaaccatattagcctttgaagcaagtgagcctgcctttgcattagccttgtactcagcggcctttgcaagcttctcctctgtgcctgctgatacagatacgtttgccttattgtcaattgactttgtcttaatctgagctgccttctttatataatcctcagacagtcccattttttctctcttcttctttgccttttcctcgttctttgccataacagcctcaagatcaagattctctatatgtctgttgacgaagaactgctggatacctcttacaagtgcagagcagatccagtaaataccaagacctacaggaactgtaaagcagataacaaatgacataaatggcatcatgagattcatcatcttcatctggcttgccatctgatcattgccgtttgtagcctgtggcatgagcttgatattaagcatctgtgtcagatatgacagtacaggaataagcagtgcaagtattacaaaaagtaaccacttatcaggcttgtccgtaaagttgctttttatgatataccaaggtgtatctgagatattcagtcccaaaaagtagttgaaatgaagtaacgcatcgtgcgtcttctcaactgcgctctggataccatcaaaaaacttaccgtccataagagcatcccagccctttgaaggaagcttataaaggatatcaatgatataattgcttaaagtatcaccacttgcatcggcaagctttgaagccgcatttgaagcattaagaccacttgatgtaacaacattatacttttccatcagactgacaagtgtattctgatatccgcttgtctgctgaattgaatcaacaagccctgtaaaagaacccttaactccgctcagataagcagggatattgtaaaatacacggtacagtgcaaacagaataggcatctgtataagcatctgcacacagcttcccatcggagaaataccgtacttctggtataaaagctgtgtctcctcctgcatggccatcattgaagcctgatcctttttatttttatatttagcctgtatagcctgcatctcgggctgcattttctgtgatagcttagaaaacttctgctgcttaatagtcagtggcaacagacacatgtagattataatcgtaataattacaatacttagtacaacgctctcaactcttccacctgtaatattagatataccactgtatatccaatccatcaggataccgagaagcttggcaattggtccaagaatagagcctggatatgcggttaataaaatgtccgacataaaaacctccattgctgctatggaaccggatcatacccaccctttgaaaaaggattacatctcaatatcctccatgccgcaagcagaccaccctttatggcaccgtacttttgcacagcctgcaaaccatactccgaacaggtcggacaatatgggcatttcgttgatttcatcggggaaatatacttcctataaaatttaatcaaaaatattaagatacttttcaaaacgattccatcttctttttcattattcaaatattttgtttcttaataatcctgtgaagacctccaagatgtaaaacagcactttctatttccttataaccaacatgccgcgctgcaactcttgcgatgactacgatgtccaaaccactatcgaacatgtcctcatgtagtctgtagctctctctcacgagacgagtaatatgatgtctaataacactatttccaacttttttgctaactgatatacctatacgattattttctgtgttatttttcagaacatacataacgaggtatctgttagcaaacgatacaccgttattatatacattctgaaaatccttgttttttttcaacgaatctgaaaatttcatttgacgctgtccttctaaaaacaatcaaaaatgaagaaaagaccacaaaaattgtggcctatgctgataatttttttcttccttttaatcttctggctgcgattacttttcttccgccagcagttttcattctctgtctgaatccatgaacttttgctctctgtctcttcttaggttggaatgtcatcttcatatatatccacctcctttacgttaaaaaacatcggtataattataacaaaaattcctgttgtgtcaaggattttctcaattttctttaaatttctacatatatttttttatcggtttacattccacaataaaaatgtggaaaacgagtttcttctatatatatagtaattcttgataaccatctatattttgatataaaccacctgttgtgaccaacatattgtggaaagttatcaagatatcaaaaagttatccacaatatgtgaataacatgttggtaactttgtataattgtggttgaaaaatgttaataaagcatttttgtaaatctttttacattgcctaaatgccaaaaatagtgtactatatagtatgtatgggattgtggagaacattcccataatatactctttatatgttaaataatggagaactttgatggataaagtaatggaaaagtggaatgaaatactacagatggtcaaggaagagcatggtctgacagacgtttcctttaatacgtggataaaaccgcttgaggtgttcgccatagacggcaatacactgtatattctcgttccgtctgagcagatggggctcagctatatcaacaaaaaatattatcttcctcttaaggtagctataggtgaggtgacaggtatcgagtatgatatccagtttattttaccggatcaggctcagagccttaagtttaaaaacaacgatacccctcagcttgagccacagactcctgtaaagggggatcactcaaacttaaaccctaactatacatttgacacctttgtcgtaggtaataataacaggtttgcccattctgcttctcttgcagtggcagaaagcccgggtgaagcatacaatccgctatatatatatggtggtccgggacttggcaagactcatcttatgcattcaataggtcatttcatcattgaccagaatcctgataccaaggtgctttacgttacttctgaagagtttaccaacgaggttatcgaatctatccgtaacggtaattcttctgccatgacaaagttccgtgacaaatacaggactgtagatgtgctcatgattgatgatatccagttcatcataggaaaggaaagtactcaggaggagtttttccacaccttcaacacactgcagacacagggcaagcagattatccttacctctgataagccgcctaaggagatggagactctcgaggagcgtatccgctcacgtttcgagtggggactgatggctgatatcggtactcctgactatgagacgaggatggctatcctccgtaagaaagctgaaactgacaattttgatatagatgatgatatcttaaactacattgcttcaaacatcagctccaacatccgtgagcttgagggagccttaaacaaacttttagccttccacaatctcgagcatactcacatcactatggatatcgctgagagagagctttccaatatcatcacgccggacaagccaagggaaatcactgcacagctcatcattgaagtagtttcagagcatttccacatctctgtagaccagatgatttcaaagaccagaagcagcgagattgcacgtccaaggcagattgccatgtacctctgcaagaccatgacctctgattcacttgatgtaatcggccagcttttgggcggcagagaccactctactatcatccacggcatcaagaaggtcaccaaggattacgaggagaatgacagtacacgtactctcatagaaactatcaagaaaaagattaatccaaattagtttctacctatttatatatgtgctcatttgcatgttaataatttggttataaccttgcttttatttccacatgagcatgttaatgacaggttgaaggaaagtgaataaaaagttatcaatttttatcatttttacttcaacaggcttttaatcaagttatcaagcctcttaaagcttgtctttaaaggctttgaaggggttttgaactttttaacagcccctaagaagaatattacgaatatcttttaaatatttatatatacgcgcaggaaggagtttttctaaatgaaacttatttgttcaaaagcaaatttactgaaaggtgttaatatcgtatcgaaggcagtacctacacgtactacaatggcaattctcgagtgcatacttattgatgcatccgcaaacgagattaagcttatggctaacgatatggagcttggaatcgaaacaataatagacggaactatcgaagagagaggaattatcgctcttgacgccaagattttttcagaaatagtgagaaagcttcctgacaatgatgtaacaattgagacagatgcttccttcaagaccgtcatatcatgtgaaaaggccaagttcaatatcatcggaaaatcaggtgatgatttttcttacataccatatgttgagagaaatgagtctattgtcctctcacagtttacccttaaagaggttatcagacagacaattttctcaattgctgacaatgacaacaataaactgatgacaggtgagctttttgagattgaggagaataagcttcgagttgtttctcttgacggacacagaatatctatcagatatatcgagatgaaaaatcactatgacagcaagaaggttgttgttcctggcaagactctgcaggaaataagcaagattattccgggttcagcggatgaggatgtggttatctatatcactaacaatcatattgtttttgaatttgaaaatactactgttgtttcacgtcttatcgagggtgagtatttcaagattgaccagatgctttcatctgactacgatactaaggttcgcatcaataagcgtgagcttcttgactgtatcgaccgtgctactcttcttgtcaaggagggagataagaagcctattatcatgaatatcacagatggcaatatggagcttcgcatcaattcatttatcggttccatgaatgaggacatcgatatcgacaaagacggaaaagatattatgataggctttaatcctaagttcttcatagatgcacttcgtgttatcgatgaggaggaggttaatttatacatggtcaatccaaaggcaccatgcttcattaaggatgatgagggcaagtttatttacctcattcttccggtaaattttaatacagcagcaaactaggagattttatgaaacagatttctataagagaacaggatgagttcattaagctgggacaggctcttaaaaaggccgaccttgtgagctctggagttgaggcaaaaattgttattcaggatggtcaggtgactgtaaacggtgagactgagcttcagagaggaaaaaagcttcacgacggagatgttttctcatatgacggcgaaacagttaaggttgttaaataatgattattaagtcaatccaactgagtaatttcagaaattacgaaaaactggatatcagctttgacagtgaaactaacataatatacggcgataatgcccagggaaagacaaatatacttgaggctgcatatttgagcggcactacaaagtcccataagggcagcaaggacaaggaaatgatccggtttggcgaggatgaggcacatatcaggacaattgtcgaaaaaaatgacaaggaataccggattgacatgcatctgcgaaaaaatggtgcaaagggtgtggccatcaataaaatgccgatcaaaaaagcgagtgagctgtttggtattttgaatattgtgtttttctctcctgaggatctcaatattataaaaaacggtcctgccgagagacgcagatttatagatttggagctttgccagcttgacaaaatatatctgtctaacctgagtaagtataataagacattagttcagcgaaacagactgttaaaggatatagcttacagacctgatttgattgatacacttcaggtgtgggatatgcagcttcttgagtatggcaggcatgttataaaaaagcggcgcgagtttgtaaatgagctaaatgagataatacaggacattcacagcaatatttcgggaggcagggagaagcttatactcaaatatgagccaaacattgatgatatttttttcgaggaagagctgcttaaggcaagaagcagggatttgaagctgtgccagacaaccgttggaccgcacagggacgatatgcttttttcagtggacggtgtggatatcagaaaatacggctcgcaggggcagcagaggacatctgctctctcactcaagctttctgagattagtcttgtaaagaaaaatataaacagcactcccgtgcttttactggatgatgtgctttcagagctggatggcaacaggcagaactatctgctcaacagcttaagtgatacacagaccattatcacttgtacgggacttgatgaatttgtaaaaaatagatttcaggtggacaaggtctttcatgtcgtgaagggccaggtggaggttattgatgagtaaagaaatacagcagaacaatcaggaatacggagctgaccagattcagatacttgagggtcttgaggcagtcagaaaaagaccgggtatgtatatcggcagtacgtcttcgagaggacttcatcatctggtttatgagatagtggacaatgcagttgatgaggccttagccggttattgtaaaaatattgaggttacaatcgaggaagacaattccataacagtacaggatgatggacgaggaatcccggtcggaaccaatcataaagcaaaaaaatcagcacttgaggtcgtttttacagtgcttcacgcaggtggtaaattcggaggtggaggctataaggtatcaggcggtctgcacggagttggtgcatctgtagtaaatgctctttccacatggctgacagttgaggtctacaaggacggaaatatttacagacaaagctacaagcgtggcaaaacagacgatacagtaaagattgttggacagtgtgacgagtcgcttcatggcacaaaggtgcattttctgccggatccggagatttttgaggagacagtgtatgactacgataccttaaagcagcgtctcagagaaacagccttcctcacaaaaggacttaagattactttaaaggatgtgcgtgagaacagccatcacaatcatgtattccactatgagggtggaatcaaggaatttgtagagtatcttaaccgtggcaaggaggctctctatgatgaggtaatctactgtgagggaacacaaaacggtgtttatgtagaggttgcattacagcacaatgattcgtttaatgattcaaccttcagctttgtaaacaatgtaatcacacctgagggaggtactcatctcgcaggctttagaaatgccctgacaaagaccttcaatgcctatgcgcgtgagaaaaagatacttaaggattcagatccggccctgacaggtgatgatatccgtgagggacttaccgcaatcatcagtatcaagattgaggagcctcagttcgagggacagacaaagcagaagcttggaaacagtgaggccagaggagccgtagatgcagttgtatcggaaaagctcacatatttcctcgagcagaatcctgatgtagccaaaaatatctgtgagaaatcacttttagcacaaagagccagagaggccgcaagaaaagcaagagacctgaccagaagaaagacctctctcgatggaggtactctgccgggcaagcttgctgactgctcagacaaggatccgaaaaactgtgaaattttcatagtcgagggagattcagccggcggttctgcaaagacagcaagaagccgtgctacacaggcaattttacctctgcgaggcaagatactgaatgttgaaaaggcaagacttgaccgtatatatgacaatgcagaaatcagagccatgattacagcattcggaacaggaatccatgaggattttgatataacaaagctgcgttatgacaagataatcatcatgacagatgccgatgtagatggtgctcacatcgctactctcatgctcaccttcctctacagattcatgcctgatctgatcaaggagggacatgtatacctggctacaccgccactttacaaggtggagaaaaacaagggtgtatggtatgcctacgatgatgacgagctcaagcagattttaaatgacataggccgtgacaataataacaagatccagcgatacaagggacttggcgagatggatgctgatcagctctgggagacaacaatggatcctgaccacagaattttgaaacaggtcatgatagacggagaaaattcatctgagcttgatgtgacatttaccacactgatgggtgataaggtagagccaagaaaagaatttattgaagctaatgccaagtatgtaacaaatcttgacatctagcagggaggagtaatttaagtggacgacaaaatttttgaccagatacagcaggtcgatttgaaaaaaacaatggagagctcctacatagattacgcgatgagcgttattgcaagccgtgccatccctgatgtcagggacggattaaagcctgttcagaggcgagtactctactctatggtcgagctcggaaatacacctgacaagccacacagaaaatgtgcgcgtattgtcggtgatacaatgggtaaataccacccacacggagacagctcaatctatggagcactcgtaaatatggcacaggactggtctatgagatacacactcgtggacggtcatggaaactttggttcagtcgatggagacggagccgccgccatgcgatacacagaggcaagactctcaaagatttctcttgaattaatcaaggatataggcaaaaatacagtagattttgagccaaactttgatgagacagaaaaagagccgacagtgctcccatcaagatatccgaaccttttagtaaacggaactacaggaattgcggtaggtatggcaaccaatatcccacctcacaatctgcgtgaagtggtcaatgccgtagtgcgccttatcgacaacgatatcgaggaaaaagaaaccacaattgatgagcttatcgatgtggtaaagggaccggatttccctacaggtggcataattctcggaacaagtggcatcaaagaggcttacagaacaggccgcggcaaaataagagtccgtgctgtcaccaatatcgagccgatggaaaacggcaaaaacagaattgtagtgacagagctgccatacaacgtaaacaaagctcgtcttattgagaaaatagccgagcttcataaggacaaaaagatagatggaataacagacctccgcgacgagacaagccgtgagggaatgagaatcgtggtagagcttcgccgagatgtgaacccgagtgtagttttaaatctgcttttcaagcatacacagctccaggatacgtttggagtgataaaccttgcactcgtaaacggagagccaaaggtattaaatctatatgatctgctcaattactatctcatccaccagaaggatgtagtgaccagacgtacaaagtttgatctcgacaaggcagaggccagggcacatattgtagagggtctcattattgctcaggacaatatagacgaggtaataagtattattcgctcaagccagaccacgcagcaggcaaagaccagattgatggagagatttggcctgaccgatgagcagtcacaggcaattgtcgatatgcgtcttagggctctgacaggtctggaaagggaaaagctcgaggctgagtataaggagctcatggctcagattgcgcagttaaaggcaattcttgccgatgagaaaaagcttcttggagtaatcagggaggaaatcatcgcaattgcagataaatacggcgacgacagaaagacagaaataggctatgacgagtatgatatgtcgatggaggatctcattcctgagacaaatacagtcataacaatgacaaaggtaggctacataaagcgcatgagcactgataatttcaaggctcagcaccgcggtggcaagggaataaagggaatggagacaatcgaggatgattatatcgtcgagatgctcatgaccacatcacaccactacctgatgtttttcacaaatacaggaagagtatacagaatcaaggcatatgagataccggaggctagccgcacatcaagaggcacagccatcatcaatctcataccgcttcagcctgacgagaaaataacagccatgattccaatcaaagaatacgaggatgaaaagtatctgttcatggctacaagaaacggaatagtcaagaaaacaccgataaaggattatgagaatatccgaaagaacggacttgcagcaatcaatctgcgcgaggacgacaaactcatagaggtcaaggtcacagacaattcagaggatattttgctcttcaccaaattcggacagtgtatcagattcaaggagacagatgtgcgctcaacaggccgtacaaccatgggtgttatcggaatgaatctcgcaccaaatgatgtgataattgcaatgcagaccgcatcaatgggtgaggcagtgcttttagtatcatcaaacggccttggaaaacgtacacgaattgacgaatttaccacacaaaaccgtggcggtaagggagtaaaatgctacaagattacagaaaaatcaggcaatctcgtaggagtcaaatcagttgaaaacgatgacgagctcatgctaatcacaacagagggaattatcattagaatccaggtaagtgatgtaacagtgcttggacgaatcacaacaggtgtcaagcttatcaacctaaaggaaggtgtgagcgtagccagcatcgcaaaggtagtagaggataagactctcatgccacctgaggaagctaaggaagagactgacgaatcagaaaatagtgacgaagactcagcagagaataataattcacatgccgaagctatcgaaaataacacagaagcataactaaattcataaaagcagggtcataagatcctgctttttgcgaatgtggtgatactattagagtcttattgcgaaaaaatgtatacatgtaagcactatgcatcatatttgcgttttcagaggatttgaatagtaataaataaacatgatacggaaaaataaatatgtttatccacaaaaacacaaaaaataatattgaattgtggataaaaggagccggaatttaaaatacagagaataaaaagagaggaaaagaaatgatcagggaaataaacgtttcagaaataacagctgcaataaaggaaatgtgcatacaggcaaatcattttctttcgccggacatggacaaggcacttaaagctgcaacagcaaatgaagaatcacctttaggtaaaaaaatattaaaccagctacaggaaaacttaaaaatagcaggcgaggatatgataccgatatgtcaggataccggaatggcagtttttttcatagaaataggccaggatgtccattttacgggaggagtattggaggatgccataaatgaaggagtcagacagggctacacagacggctatctgagaaaatcagttgtaaaggatcctctcatcagggaaaatacaaaggacaacacacctgcagtcatccattactcaatagtttccggcgacaaagtcaaaataacctttgcaccaaagggctttggaagtgaaaacatgagccgtgtatttatgttaaagccggcagatggtatagagggagtaaaaaatgcgattctgacagcagtttcagatgcagggccaaacgcatgtcctcctatggttgtcggagtcggagtcggtggaacctttgaaaaatgcgcaataatggcaaaaaaagcgctgacaagagaagcaggcatacattcagacatagagtatgtggcagagcttgaaaaagagatgcttgaaaaaattaataatctgggtatagggcccggaggactcggcggaagcactactgccctcgcagtaaacataaacacatatccaacccacattgcaggattgccggttgcggtaaatatttgctgtcacgtaaaccgccatgtagtgaaggaattgtaaagaattaccgcatagaagaagaaagaaaatggcaattttaattgttacagctacaatgaaatgtgaactgtaattaaaaaagctataattattacaggttatattatgctggaaaataaaaatacagtaaaaataaaagaatcaggagaaaaaaatggaaaaacatataacaactccaataacacagaaaataacaaaagacctgaaatcaggagactatgtatacataacaggtgaaatgtatgtggcaagagatgctgcacataaaagaatgatagaggcgctggaccgtaaagaagaactgccaatagatataaaggattcgacaatctactatatgggaccatcaccggccagagatggtcgtccaattggctcagccggaccgacaacagcaacaagaatggacaagtatgccccaagactgcttgatttaggtgaaaaagcaatgattggcaaaggaaaaagatcaaaagaagtaatagatgcagttattcgcaataaagcagtgtattttgccgcagtcggtggagcaggcgctctcctttcaaaatgcataaaatcatcagaagtaatctgctatgatgatctcggtgcagaggcaataagaaagatatacgtagaagatttcccggtaattgtggtaatagacagtgaaggaaacaatctgtacgagacttcaataaaagaatttaaaaaaatataaaaatactattgacaaaacaaagaaaattttatagaataaacaatgcgtcacgtaagtgcgtaaaacatttaaataatttatgtaaagactttggagaagtactcaagtggccgaagaggtgcccctgctaagggtataggtcgggaaactggcgcgagggttcaaatccctccttctccgctttatcttctacataaaataatttaaaaaagttcttgacaaatgaaaaacattttgatagaataaacaagctgtcgcaagacagagaacttaaaacagagttcaaaaaaaaagtgcttgacaaacgaacagcgatttgataaaataatcaagctgtcgcaagaaagcaaaacaaagaacattgataactgaacagtgagaaaccttgaaagattttgagaatcaatcagaacgcttcaatgaaaattgaagacctttaaaacagtaaattcagatttatctgaatgaacgaattagccaagtttaacttgactgagatcagctttttaacatgagagtttgatcctggctcaggatgaacgctggcggcgtgcttaacacatgcaagtcgaacgaagcactttatttgatttccttcgggactgattattttgtgactgagtggcggacgggtgagtaacgcgtgggtaacctgccttgtacagggggataacagttggaaacggctgctaataccgcataagcgcacggcatcgcatgatgcagtgtgaaaaactccggtggtataagatggacccgcgttggattagctagttggtgaggtaacggcccaccaaggcgacgatccatagccgacctgagagggtgaccggccacattgggactgagacacggcccaaactcctacgggaggcagcagtggggaatattgcacaatgggcgaaagcctgatgcagcgacgccgcgtgagcgaagaagtatttcggtatgtaaagctctatcagcagggaagataatgacggtacctgactaagaagcaccggctaaatacgtgccagcagccgcggtaatacgtatggtgcaagcgttatccggatttactgggtgtaaagggagcgcaggcggtgcggcaagtctgatgtgaaagcccggggctcaaccccggtactgcattggaaactgtcgtactagagtgtcggaggggtaagcggaattcctagtgtagcggtgaaatgcgtagatattaggaggaacaccagtggcgaaggcggcttactggacgataactgacgctgaggctcgaaagcgtggggagcaaacaggattagataccctggtagtccacgccgtaaacgatgaatactaggtgttgggaagcattgcttctcggtgccgtcgcaaacgcagtaagtattccacctggggagtacgttcgcaagaatgaaactcaaaggaattgacggggacccgcacaagcggtggagcatgtggtttaattcgaagcaacgcgaagaaccttaccaagtcttgacatccttctgaccggtacttaatcgtaccttctcttcggagcaggagtgacaggtggtgcatggttgtcgtcagctcgtgtcgtgagatgttgggttaagtcccgcaacgagcgcaacccttatctttagtagccagcggttaggccgggcactctagagagactgccagggataacctggaggaaggcggggatgacgtcaaatcatcatgccccttatgacttgggctacacacgtgctacaatggcgtaaacaaagggaagcaaagctgtgaagccgagcaaatctcaaaaataacgtctcagttcggactgtagtctgcaacccgactacacgaagctggaatcgctagtaatcgcagatcagaatgctgcggtgaatacgttcccgggtcttgtacacaccgcccgtcacaccatgggagttgggaatgcccgaagccagtgacctaaccgtaaggaaggagctgtcgaaggcaggctcgataactggggtgaagtcgtaacaaggtagccgtatcggaaggtgcggctggatcacctcctttctaaggaaatcgagtagagagtttttcactgttgagttatcaatagataacagaatatttccggtggcgatgcgcttttgggaaacacccgtccacatcccgaacacgatggttaagactgaagcggccgataatactatactggtaacggtatgggaaggtaggtggctgccggatttataaagaacagcatagcatatatgctttcaaaatagaacaggctcgaaagagctaacctacatcagcagggaagtgctgtttagatagctggttttaccagtgattagagattttaagagattaagatttctaatgactgataaaacagtcaaaaagtctgtgagaactaaaactggtaatcacagcagtgtaccttgaaaacttcatacaaatgatttgatgaataaatattctattcttaagaatatctaacaatcaagacatccgagaaacaaaaccaagttgtgaacaacaacaaagttctttaagttattaatgatgcaacgctatgcatcgaagagattaagcaaagaagagcgcagggtggatgccttggcactaagagccgaagaaagacgtgataagctgcgaaaagctgcggggagatgcaaataatccttgatccgcagatgtctgaatggggaaacccggtacgaagaactcgtatcatccatacgccaatccataacgtatggaggggaacccggtgaactgaaacatctaagtagccggaggaagagaaagaaacatcgattttgttagtagcggcgagcgaaagcgaaagaggccaaaccggagtgcgtgcactccggggttcggaccgcatttaagattcagtgattctagcagaaaggtttgggaaagcctgccggagagggtgaaagccccgtaagcgaaaggagagctgactgagcggaatccagagtacatcgagacacgagaaaccttgatggaatgagcggggaccaccccgtaagcctaaatactacttagtgaccgatagcgcatagtactgtgaaggaaaggtgaaaaggaccccgggaggggagtgaaagagaacctgaaaccctgtgtttacaagctgtggaagttctttaaatgaacaaccgcgtactttttgtagaacggtccggcgagttgcggatactggcaaggttaagcacttaaggtgcggagccgaagggataccaagtcttaacagggcgtaaagtcagtgtacgcagacccgaaaccgggtgatctatccatgtccaggttgaagttgtcgtaaaagacaatggaggaccgaagccacatccgttgaaaagggtgggcatgaggtgtggataggggagaaattccaatcgaacccggagatagctggttctcctcgaaatagctttagggctagcctcgatttagtcttatggaggtagagcactgaatttccgcgggggcgtcaaagcttaccaaagaatatcaaactccgaatgccatgtagatgatgatcgggagtcagactgcacgagataagttgggcagtcaaaagggaaagagcccagaccaccggctaaggtcccaaagtgcgtgttaagtggaaaaggatgtgggaattcgaagacaactaggatgttggctcagaagcagccatacattcaaagagtgcgtaacagctcactagtcgagagttcctgcgccgaaaatgtccggggctgaaacacgacaccgaagccgtggactcgcaatgcgagtggtagaggagcattcttaaaaccgacgaagctgtaccgaaaggagcagtggagggataagaagagagaatgccggaatgagtagcgagagaaaggtgggaatcctttcggccgaatatctaaggtttccagagtaaagctgatctgctctgggtaagtcggggcctaagcacaggtcgcaagacgtaagcgatggataacaggtttagattcctgtaccacgcattatcagaactgtagggacgcatgtggaaagcacgggccgggaatggaaagaccggtacaagcggggtaggtgtacaataggcaaatccgttgtataatccgaagacgtgatgtggagcgaaataaagtagtgaagcgtgtgagccatgtgccgagaaaagctgctattgtgtaatgcgtgcccgtaccgtaaaccgacacaggtggatgaggagagaatcctaaggccgacggaagaagcattgttaaggaattcggcaaaatgaccccgtaacttcgggagaaggggtgcctgcgagagcaggccgcagagaataggctcaagcaactgtttagcaaaaacacaggtctatgcgaaaccgaaaggtgaagtatatgggctgacgcctgcccggtgctggaaggttaagaggagaggttagcgtaagcgaagctttgaatttaagccccagtaaacggcggccgtaactataacggtcctaaggtagcgaaattccttgtcgggtaagttccgacccgcacgaaaggcgtaatgatttgagcactgtctcgacaatgcatccggtgaaattgaagtaccagtgaagatgctggttacccgcgccaggacggaaagaccccatggagctttactccagtttgatactgggattcggtactgcatgtacaggataggtgggagacggagaaggatggacgccagtctgtccggagtcgctgttgggataccacccctgtagtactgggtttctaaccagttgccatgaactggcaatgggacaatgtcaggcggggagtttgactggggcggtcgcctccgaaagggtatcggaggcgctcaaaggttccctcagaatggttggaaaccatttgaagagtgcaaaggcagaagggagcttgactgcgacaccgacgggtggagcaggtacgaaagtaggacttagtgatccggtggtataaagtgggattgccatcgctcaacggataaaagctaccctggggataacaggcttatcactcccaagagttcacatcgacggagtggtttggcacctcgatgtcggctcatcgcatcctggggctgtagcaggtcccaagggttgggctgttcgcccattaaagcggtacgcgagctgggttcagaacgtcgtgagacagttcggtccctatccggcgcgggcggaggatatttgagaggagctgtccttagtacgagaggaccgggatggacggaccactggtgtatctgttgtcgaccaacggcatggcagagtagccaagtctggaagggataaacgctgaaggcatctaagcgtgaagcccccctcaagatgagatatccctcctatatggagtaagaccccttgaagactacaaggtagatagggcagaggtggaagcatggcaacatgtgaagctgactgttactaataggtcgagggcttaatctggttaataacggagaaaaacaaatcggatttgtatgaagttttgaaggtacaaaccttaataatcctcgatagctcaatggtagagcactcggctgttaaccgagttgttgtaggttcgagccctactcggggagttttttagtataatatatggtgacatagccaagtggtaaggccccggtctgcaacaccgtcatcgccggttcaaatccggctgtcacctctctcaaaaggactacatcagtttatgatgtggtctttcttttatataatttgcaaataaaatatattgtgaatttatgtaatattcgtaatatatgttgtacacatttcattattttttaattttctaaattatttttcaggatgctacactaaattaataaagagaaatataagcctgataaacagaattatatttctctttttaacaactcttatacttttttgaatagttgtagtagtattattattcctcttcaggatatttcataccccattcggttcttatatcagacatgattttcataacatcatatgtatactgactgtgaatgaggttttctatttcatcggatgatgcagagtttatggctttttccatatcacatacttcgtaatacagtgcatctgatgtatcaccggcatcaattacttctttatgaccatcctctgtatatgtaatagttgcctgcattcctcttggatactcaaagatttccacatatgccttgtcaaaagatagtgtagcgcgtttgggctgcttggaatgtagagataatgtgacagttgccatctcggcagcatcgttcataagcagaatacctgcctgttcatcaacaccggttggtgcatatttaacctgtgacgatacttgtgttggtgtttccttgaagaaccagcggataagagaaagtgagtaaactccaatatcaagcaatgctcctccagcaagcttacgactgaaaaatcggtttgtcatattgtaatccttgtagcttccaaaattgacctgaattaaatttagcctgccgagttgtccacttgcaattatttcgtttagctttttataaacaggcatatgatatatagtcatggcttcagcaagaataacgttattttctttggccagtgagacggcttcatcgagctctgcgatatttaaagtaatagatttctcacagagtacatgctttccattagaaagggcttttcttagataattgatgtgagtattgtgtggagtggagatgtaaatgatatccacatcaggatcataaaagacgtcatcaatgttgtcatatacctttgaaatgccatatttttgtgcaaaagctacggccttttcatgagttctgttggcaactgaataaagagtgcgtccttccttggagagagcatgcgcgagctcattagctattacgccgcagccgagtgttgcccaattaagctgtttcatgtgaaatcctcctttttaacttaaagtattgtagctgtgatggtacataaattgtctaaaatgatgtgaaataacaaaatataaactcattgatgataccttttgaccctttaatcataaaatatgtaccataatgaacatattctagcatgatgaattatgaattacaatgcatttagattcaaaacagtcaaaaacagtcaaatttgatagtgactaaattaaaattagttaatttgaactatattttagattataaactagtaatagaaaagatactaaaattagcaattaggcaagtaataaagatttatgtagtatattctgcacaaaattagaatattacttttgcatatattacacaatttgaaatttgacattatataattttaacaattttcatggtgattatttgtgaatataaatgactgattatgattgacaatgactgattttgaaaatataataatactacaagttagatgattattgattttaataaaaaaggaaaataattgaatataaaagattaaatgatagtctttgagcaatttgaaaacaggggtgattagatgctggcagaagatagatgcaaaaaaatactcgatatattagattcgatgggaagtgtgactgttcagcagcttatggatgagcttgatacatccgagtcaacaatcagacgtgatctggttgcaatggacaagaagggttatctcaccaaggtacatggtggtgcgattgtaaataatacgaatatccatactcaggatgagaaggttatcaacaggcttaagcagaatcgcaacgaaaaggaacagattgccagatatgcggcatcacttattgtggataatgattttgtttatatagatgccggtactacaacagcagtcatgattgattatattactgcaaagaatgtggtttttgttacaaactctctgactaatgccaagagaatttccgataggggatatacagtatatattctgggtggggagttcaagtctactaccgaggctattgtcggagatgaggccgttgtgacgctcgataaatataattttacgaagggcttctggggaactaacggaattactgtgaagaatggatttacgactccggagataaaggaggccatggttaaaaagaaatccatggagaatagcaaggagaaatacattcttgcggatgacagtaagttttcacaggtatcaagcatcaagtttgctgattttgaagatgctgtaattgttacaaatgcactaaacaatgacaactataagaaatacaaaaatattaaggaggtctaacatgatttacacagttacctttaatccatcattagattatattgttgatgtaacagattttaagacaggagtagtcaatagaacgactggagagaagatttttgcaggtggtaagggcatcaatgtttccatggttcttaagaatcttggaatgagcaatacttcacttggttttacagcgggttttacaggaaatgaaattaaaagacttctaggaaaaaaaggcgttaatactgattttatagaggtggaggatggtatttcacgtattaacgtgaagcttcgctcaaatgaggaatccgagattaatggtcagggaccggtaatcactgaggacaacattaaaaagctttatgagaagcttgactgcttaaaggagtctgatgtgcttgtgctcgcaggaagtattcctgatgtgatgccttcatcaatgtatatggatatcatgaagcatcttgagggccgcggaataaatatcgtggttgatgcgacgagaaatctgctcacaaatgtgcttgcgtataagccattccttatcaagccaaacaatcatgagctcggtgagatattcggggttgagattacagacaaggacgatgtgataaagtatgcaaagaaacttcaggagcagggcgcaagaaacgtgcttgtttcaatggcaggcgacggagcagtgcttgtgactgaggacggacaggagtttaaggcaaatgcacctaaaggaaagctcaaaaactctgtaggagcaggagattcgatggtagccggatttgtttacggatacctcaaatcaaatgattataagcaggcatttatttatggtgtatgtacaggaagtgcaagcgcattttctgaggagcttgctacaaagcctgaggttgaggcacttatagaaaaatgggagaatgcttccaattaaacaaacggtatcaaaaggttgatataaataattaatatattatattaggaggaatgatatatgacaatcagggatttattggcagctgagagtatcaatttaaatggtacgcctgccggaaaaaccgaagcattgaatcagtgtattgatttgatggcaaaaagtggcaaaattgccgatgttgaaacgtatcgcaagggcgtttttgcaagagaggaggaaggcacaacaggaattggaatgggtatagcaattcctcattgtaagtctgatgccgttactaaagcaggtcttgcagcaatggttgtaaaggatggggttgactttgaatcactcgacggtacacctgcaaagattattttccttatcgctgcaccaaacacagaggacaatgtgcatcttcaggtgctcagcaagctctctgttatgctgatggacgagcagtttacaaattctcttatcaatgccggctcagtagatgagtttttaaatatcatcgacagtgctgaaaaagcaaaggatgagaaagaggctgccaaagaggcaaaggctaaagagcctgttgaggtgaagaaggacgatgtatttatcgttgcagttacagcctgtcctacaggaattgcccatacttatatggctgctgaggctattgagaaaaaggccaaggagctgggatatcaggtaaaggttgagacaagaggctcagccggagctaaaaatgtactcacagatgatgagattgcaaaggctaccggtgttatcgttgcatgtgatacaaatgtgcctacagaccgttttgacggaaagaaggttattgagtgtcaggtttctgacggaataaataagacagaggagctcgtaaagagaattgctgccggtgatgctcctgtatttaaggcatcaggtaaaaaagaggcttcacattcatctattggtggaaaggagagcattggacatcagatttacaagcatctgatgaacggtgtttcacatatgcttccgttcgtagttggtggtggtatccttatcgcaatcgcgttccttatcgatggattcagtgttgaccttaattcactgccggctgaccagagagcaaatttcggtactattacacagggagcagcattgtttaagggaatcggtggaacagcatttggatttatgcttcctatccttgcaggctttatcgctatgagtattgctgaccgtccgggtcttgcagttggtttcgtaggcggttcaatcgcagcaaacggtacatcaggcttccttggagcactggttgcaggtttcgttgcaggatatattgtaaatctcttaaagaagatattctctaagcttcctgagagtcttgatggtgtgaagccggttcttctttatccgctgcttggtatattcctcataggcgttataatgcagtttgtagttgagcctccaatcggagctttaaatacagctatcaacaacggtcttaatggacttaacggtgcaagcgcagtagttctcggagtacttctcggaggaatgatggcaatagatatgggtggccctgtaaacaaagccgcttatgtatttggtacagcttcaatcgctgccggaaactacaatatcatggcagcagttatgattggtggtatggttccaccactcgcaatcgctcttgcaacaatcttcttcaagaacaagttcacagcagaggagagaaaggcaggacctacgaactttatcatgggattatcatttatcacagagggtgcaatcccattcgcagcatctgatccgcttcatgtccttccggcatgtgcagttggttcagcagtggcaggtggactttcaatggcatttggatgtacactcatggcacctcacggaggaatcttcgtagtacctacaatcggaaatccgttaatgtatcttgtagcattagtaatcggagccttcattgcatgtggattactcggattactcaagaaaaaagtaagtgaataagcaatcctcaattatcatttaatccaatctataaactaatcaacaaaggcactgcttcggcggtgtctttgttgttatgttgttatacaaaaattaaaaatataaacattctctgaaataacagcctcatgccttgacgagtgaattttcgaagcttaaagtagtattaggatgaaatagtaagtcataaaaagcaattatttatgagacttaaatataaaaaacagtgaggaaaatcatgggtaaggttataggtatagatttaggaacaacaaacagctgtgtggcagtattggagaacaatcagccggtagtcataactaacagcgagggtcagagaacaactccgtctgtagtggcttttacaaagaatggagagcgactggttggcgaggctgcaaagaggcaggcagcagtcaatgtggacaggacatttttctcaataaagagacagatgggaagcgatttcagggcaaaggtggacggaaagctgtattcagctcctgagatttcttctatgattctcagaaagctgaaaaaggatgcagaggactatattggagaggcagtgacagacgctgtaatcacagttcctgcatatttttcggatgcgcagaggcaggcaactaaggatgcaggaaggattgcggggcttaatgtgcttcgaatcataaatgagccaacctctgcggcactcgcatacggactggaccacggacagcagcagaaaattcttgtctacgacctcggaggaggaaccttcgatgtgtctgttatcgaaataggggacaatctgatagaggtgcttgccacagccggtgataatcatctgggtggagatgattttgatgagagaatcacgaattatcttgtcacagagttttacagacagcagaatgtggatctgagaaaggataatactgctatgcagcgtgtcagggaggaggctgagaaggcaaaaaaggtgctttcatcttcatcctcaaccactataaacctgccatttatcactactgtaaagggacagccggtccacatggagatgaacctcacaagggctgagtttaatgagataacaaaggatctggtggagagaacggccattccggtaaatcaggcactttcagatgcggggatttctgcagcagagcttggaatggtgctgttggtaggaggctcgacacgtgtgccggctgttgttgatgaggtcagaagaattacaggaaaagagccttcacacaacctgaatcctgacgagtgcgtggcactcggtgcagcagtacagggtggcaagctcggtggagcaattgtcgcaggcagcagtgcggcagagattatactgatggatgtcacaccgctttcactcggaattgagacagttggtggtgtctcaaccaaaattattgacagaaatacgactattcctacgagatacagccagatttttacaactgcaggaagcttccagacctctgtggatataaaggtactgcagggtgagaggcagtttgcaagggacaataagctgattggaaacttcaggctaaagggcatcaagccggctccggcaggtgtgccgcagatagaggtgacgtttgatatagatgcaaacggcattgtgcaggtttctgcaaaggacctgggcacaggaaagcatcaggagattacgattaccgcaagctcaaatttgtctgattctgagattgagcaggcaatccgcgaggcacaggagtatgaggcaacagacggacaaagaaaggcttatattgatgcaagaagtgaggctgatacgcttgtgcgacaggtggaaaatgtcatggctgacaaggaaaaaagaaaggctatggacagcgcacagaaaaagagtgtgaaatcgttactttcatatgtgaagaaacttatttcaaggacaaagcccggaaatgtgagcgaagagcaggctgccgagataaagcatgcggcagatgaactgagaaatgcggcagtgggattgatttaattatagtaactactattattcatttggctatttacgagaagcggattttcatataaaatatgggtaagtggtgagtattcataaccaccctgaatagttataatgttaatttaaatccgaggaaatagaaaatgaatgcgaacgataaaacagaaaaggtactaagagaaattcatatcatgctctcaaaggcggagccgtataagccggagccgagcagggtgattataaacaagcagcaaatgatagatttacttgctgagctgaataagtgtatatatgcaatacaggatgagtatgagcttactgaacagagtcgcaatcacgcagagagagagttcagaaagaaaggggatcagatagtctgggatgcaagcagaaaggctgaggatgtgtatgcagcatcggttatctatacggatgaggcgctttcaagagtgcgtgatatcatcaatgataccaacgagtcacttgaaaagctgtgcaagaatatgaaggataagattgcagagcaggagaagatagttaaaactaaccagtatgagctcaagggacagcttcaggatttgtccgatacggagaagtatcttaagattatcgatgacagaaataaggagatagaacgtcagaaaaatgcaggtaaacctgtagaggagcgtactattgacaatgaagagaagtccatctatgcaaacagacagactgaaatcaaggtaaatatggattatatcagaaaactgggacttgctgagggcgaggacctgggagatggtgtagtgggtgaagtgaagcttgcagacgatacacctgatgccggattaaatcatagcaatgataaggatgaagccaaggctgccggctcaaaatcgtctgttgatgaggattataaggcaataagcagaaaagccggcaatccacctgttatcaacacaaaggaagggaaggagctcacagacggtatccacagaatgtggcagagcatcaccggaaataaagggaaatgaaacacacctatgtaatataaagcagcagttcaaaacagaacggctgctttttggcttatatttaaagtgggtaatattaagcagattttaagaaaaacaaagtggataatctgataaaatatagctgactaacggcaggagaaggtttctgttaaaaattcatagaaggaggataatatgacaatattagtttgtgatgacgacaaggaaatagttgaggcaattgagatttacctgatgcaggagggctacgacgtggagaaggcctacgacggcatacaggcagttgaaattatgaagaataaaaaaatagacctcatgataatagatgtcatgatgccaaagctcgacggaataagagccactttgcagatacgaaaggaaagcagggtgccgataatcattctatcggcaaagacagaggatgctgacaagattttaggcctcaatgtgggggctgatgattatgttacaaagccttttaatccgcttgagcttgtggcaagggtaaagtcacagcttcgcagatataccactctgtcaagcaatgatgcagccggagacaaggtttatgaggccggaggtcttttggtaaatgatgatttaaaaaaggtgactgtggatggcgaggaggtaaagctcacaccgattgagtacaatatcctgcttttactccttaaaaacaagggaaaggtctactcaataaacgaaatatatgagagcatatggaacgaggaggcgataggcgccgacaatacagttgctgtgcacatcagacatatcagggaaaaaatagagataaatcctaaggagccacgctatctgaaggtggtctggggagtaggctataagatagaggacaacaaatgaagcagtatacgataggaaaaaaagcagcggtcatagtcttacatcagctatgcatgatacttatggtaacaggagtgtttgccacaggctatgcattcaggcacgatgcgcatgaaaatattgatatatatacactaatatctcttgcgggcctggtaggcagctttgtgagcctggcatatatggcaaacgtggcaggcagaaaatcagaggatgattacacaatatactatttaccgattgacaaggtatactctgatgtgatgctagtgatatttacactgctcatggtatttatgggaaaagtgatttcaggcgtaaaaaaccagcattttgactatgcatcactcattatgacggccggtacatttacttttttgtttgatctggcttttattattttataccagagcattgtaaggaagataaaaggcaatatactttacacacacagcctgatgtacaagggctatgagcttttgaaaagagttattgagaaaaaggatatccacacacaaaaaaataaagagataatgcgcatacaggaggcacttgaagctatctcggaaggagcgcttgacactacactcaatgtcaatgagtttcatgggcagcagaaaaaggtggcggaggctgtcaaccatatacgccagggtcttatgagctcggtaaatgagagccttaaaaatgaaaaactaaaggcagacttaataacaaacgtatcacacgatgtaaagacacctctgacttcaatagtcaactatgttgacctgcttaagagggaaaatctggaaaatgaaaatgccaaatactatatacatgtgctggaggaaaagtcacagcgcttaaagcagcttacagaggatttggtagagacatcaaagattacctcgggaaatgtgaagctcaatatgcaaaagcttgatctggttgagcttttataccagaccggaggtgaattcaatgagcgatttgagtcgagaaatctgacaatagttacaaaaattccatcagaacagatatttatctatgcggatgggcgtcagctttaccgctctattgaaaatctgtatactaatgccgcaaaatatgcactggaaaataccagagtgtatgtagagcttgaaaaggcagataaaaaggcagtttttacaataaagaatgtgtctaagaacgagcttgacatagtaagcaacggaaatgtagacctgacagagcgttttgtgaggggagagaggtcgagaactactgaaggaagtggacttggactttcgattgcaaagaatctgacccatttgatgggaggaaaattcgaaattaaggtagatggtgatttatttattgccacaattacctataatattatataatagtaaataaaagaattttgaaatacacatacggaggtagaataagtgaaattatatgaaaatggtgcttaccttttaaacggtaaggaagtaataattgatggacctaaggctcaggcagctgtcaaaagcaagaccggcatggacatcgataaacagacagctaagcaggagacaattgcttacggtattttaaaggagcacaatacatccggcaatatggacaagcttcagattaagtttgataagcttacatcgcatgatatcacatttgtaggtatcatccagacagcacgagcttcaggacttgagaaattccctatcccgtatgtacttacaaattgtcacaacagcctttgtgcagttggtggaacaatcaatgaggatgaccacatgtttggtctcacatgtgcaaagaagtacggtggaatctatgtaccacctcatcaggcagttatccatcagtttgcacgagagatgcttgccggcggcggaaaaatgatacttggttctgattcacatacacgttatggtgcacttggtactatggcagtcggcgagggtggacctgagcttgttaagcagcttcttgaacagacatatgatattgatatgcctgaggtagtaggtatttacctgacaggagagccaatcaagggcgttggaccacaggatgtcgcacttgcaattatcggagaggtattcggaaacggcttcgtaaagaacaaagttatggagtttgtaggaccgggtgtgtctaatctgagcgttgacttccgtataggtgtcgatgttatgacaacagagactacatgtctttcttctatctggagaacagatgaccaggttaaggaattctttgagattcacggtagggctgaggatcacaaggagcttaatccgggtgaggtggcttactacgacagatttattgagattgatttaagccagatccgcccaatgatagctatgccattccacccaagcaatacctatactatcgatgagctcaatgcaaacctcatggatattctcgatgactgtgagaagagagctgaggtaagctttgacggcaaggtgaagcttgatttaaagagtaaggtaagagacggaaaactgtatgtagaccagggaatcatcgcaggctgtgcaggcggtggatttgagaatatctgcgatgcggctgacatattaaacggacattcaatcggagcagacgagtttacactgagtgtttacccggcatctactccaatatacatggagcttgtgaaaaacggagctgtagcaaagcttcttgagacaggtgcaatcgtaaagactgctttctgcggaccttgctttggtgcaggagatacacctgccaacaacgcattctctatccgtcattcaacaagaaacttccctaacagagagggttctaaggtacagaacggacagatcagctcagtggcactcatggatgcacgttcaatcgctgcaacagcagcaaacaagggcttccttacatcagcagcggatattgatgtcaactttacaaagccaaaatatttctttgacaagactatatatgagaaccgtgtatttgacagccatggagtggcagatccttcagttgaaatccagttcggaccaaacatcaaggactggccggcaatgagtgcgcttcctgagaatatgctccttaaggtggtttcagagattcatgatcctgttactacaacagatgagctcattccttcaggagagacatcttcatatcgttcaaaccctcttggacttgcagagtttgcactttcaagaaaggatcctgagtatgtaggcagagcaaaggaaatccagaaggcccagaaggctatagagagtggtgagtgcgcaggaaaggctgttcctgaggttgctgaaatcatgggagtagtaaagaaaaaattccctgaggcaagccatgagaatatgggctttggaagcacaatttttgctgttaagccgggtgacggctcagcaagagagcaggctgccagctgccagaaggtactcggaggctgggcaaatatcgcaaacgagtatgccacaaagagataccgttcaaaccttatcaactggggaatgcttccattcatcatcgatgagggagagcttccgttccacaacctcgactatatcttccttccgggaatcaagaaggaaatcgaggatgcaaagacggagtttgaggcatatgttgtcaaggatggtgaattaaagccatttacactgaagatgggtgagctcacagatgatgaaagagagataatattaaagggatgtctcatcaactataatcgtaaataaggagagtctaatccgatggaagaaaccggaaaagctggtaaaaaatcaaacattgagataaatgcagataagggtgcgaagcagaattcgcacccggggcgtgaggaatggccacatctgatcagaataggtgtcatggtatttgtcacgtttgcagtcagtatactgtttttctttgcactgtacagatttgagggctttgcaggcatatggagcaagctgcttgcggcagcaatgcctattataatgggacttgtgcttgcatacctgatgaatcctgtcatgctgtggctggaaagatgctttaaaaagcttctttccaaaaagatgaaaagcgaaagcaagctgcgaaaggtttcaagagctcttgcaattacaggctcggttattattctggtagcgattatttcgctcctcattgcggctattgtgccttctgtcatagcaagtatatcgggacttatgaagacactgccaaatgatgttgcggcattcattaacatgataaagaacggcaatttcggggacagcaaaattgctgagctcgcgagcacaggtttacagaatgcaaccgactacattgaggattatgccacagaaaagctgattcctgaggcacagaagtatgttgcacagattacaaccggtgtgatttcggtagtcagaggcttatttaattttattatcggaataatcgtgatggtctatgtgatgagtattcaggagactctcgcaggacagagcaaaaagataatatatgctgtctgcaagccaaagacaggcaatatcatcattgagacgatcagaaagacaaatgagatttttggaggcttcataagcggtaagattatagattcactgattataggcgtgattgcatatttcggatgtctgattttagggattccatcatcggtgctcgttgcagtgattatcggcgtcacaaatgtgattccggtattcggaccgtttatcggtgcaattccatcgttactcatagtagtaattcagagtccgtggcatgcgctttatcttctgatatttattgtcgtgctgcagcaggtggatggcaatataataggccctaagatacttggctcatctaccggtctttcgaccttctgggttatgtttgccatactaatcggcggaggaatgtttggttttcttggaatgttacttggtgttccgacctttgctgtgatatactatattgtgaaaagagttgttaattatgctctcaggaaaaagaagcttcctgaggacacaagggattatacaaagacaacaggcgtagataccaaaaataataagcttaaatacgagtaggtgaaataagtggataaatacgaatacaatctcaagctggatcagataaaagccctaagcgccgaggagggctatatgagcgcagcagagattgcggatagcataaattggaacaaaattaaaaatgtaaatacactcgttaaaatcggcgaaatctacgagaaggccgaaagataccaggatgcaagggacatacttttaatggcctatgaccgttcaccaatcggcaggatgattatatacagactggctgaggtcgccatcaagatgggtgattatgatgctgctacagagtattatgatgagtttgttgagatagcgcctcatgatgatatgaagtatgtattaagatatgccatcaaaaaagggcagggagcttcatttgatgagcttatcactattcttgaagagtacaaggatgaagaatacactgaggagtgggcatacgagcttgcatatctataccacaaggccggaaaagccgataagtgtatagatgcctgcgatgagctcattctgtggttcggagacggaccatatgtggagcgtgcgctggagcttaagatgctttatcagccacttaccaaggctcaggaggaaaagtacagacgattcaaggcagagaaggaaaagccggctaagataaaggatgaggctgaggtcactgagataggtgccatggagatggtaaagggcggagagatagtgcatgatgacgtaactattccgcagattactgtaaatcaggagaagttcaatactgtaaatttacagcaggagattgccaagggtatgcagcagatcatggaggccaagggcaagaatgaagttgctgatacgatggataccatcaaaaagatagttgaggatattccttatctcaagctcgaaaaggagcaggaagagtatgtacagcagccggaagagacagagcatatcgctacagatgaagagatagatggttcacttaagttgaatttcaaggagcttttgggtgaagacgctgacggacagatgtctatggtcatgagtgaaaagactcagcttgagcatcagattacaggacagatgtctatacaggatgtgcttgaagaatgggaaaagaccagacatgcggctgaaattgcacttaaagaggctgagcagcagaaacttgagtcagctaaggcaagagcacttcaggaggcaggagacatcatggagagactaaatgatgtcattccaaagctggatgcaggtgtcactccgaaggaacttcttgaggaggagtatttgaaggtcccggttgatattatagagcagaaagctgccgtgaaggagcctgaagaagagcagaaaccggatatgcaggagctttatgcagaggagactgtggatgaagtacaggagccgcaggaagcaccggaagaggctatagacgaagtgcaggagtcacaggaagcaccggaggatactatagacgaagtacaggagtcacaggaagcaccggaagaagctatagaagaagtgcaggagtcacgggaagtaccggaagaggctgcagatgaagcaaaggaaccggttggagagccggaggatataattatggcagaggagtctgagaaagacgagatactcatgcagccgactaccatgatgcctgaaataacagatgatatgttaaatgtcgatgatgatacatcagatgatgagacttcacaggagaaagaaaacgtttctgagaagagagattttgatcatgtgacatcatttatcgagcaggaaatagccaagatgacagcaaagaatccgggactggagaagaagctggatatggctaagacaagaaaaatgccggatatttcattgccggaggatttagacagcgaagaagatgactcgaaattgaaagaaacaaaacatataaaagagcttacaagcgaacagaaagctatattttcatatttcataccggtaaagggtatggaggatcagatctgcaaggcatataatgcagtgcttgatcatttcaacaggaaagaaaatgcatccacaggcaacctcattatacagggagagcagggttgcggaaagacaatgcttgctacaagctttataaaggtattacaaaaagatggtgaacagcttacaggaaagatgggcaagattgatgctgccgcactcaataaaaaggatgtgcagcaggtagtcagaaagataacaggaggctgtctcatcatagaaagagccggtgatatcgaccgcagcatagctgcccagctatcatttttgatggagcatgatattacaggaacactctatatacttgaggatacatcaaagggtataaagaaggctctctcaatggatgagggctttgcatccaagttcacggaaaagatatcggtccctatttttacaaatgatgaactcgtattgtttgccaaatcgtactctgcagagcttgggtacaagatagatgagatggctattctggcattgcataacagaatcagcaatattgagaggatagaccaggctaccactctgacagaggtcaaggatataattgacgaggctatagacagggaggctcacagcggactgaagaaggctataagtattctgacagccaggcgatatacagatgatgaccgaattgtactcaaagaggatcatttcagggaaaaataaatacttatgggggtatatatatgtgtaattttacagcaatggattgttacctgtttggtcaggcaacacactatgatatctacaagaagatgggtgctcacttagctgtgcgcaaaggaaaaaaaggagtgtgctttgacgtctgggcgccacatgcgagggaagtatacgtgtttggtgagtttaacgactggaatgagaccagtcatgagatgaagcgtgtagagccggaaaccatgggagtgtatgagctttttgtaccgggagcgcaaaagggtcagatgtataagtttattatagtcactgaacagggtgataagctgtacaaggcggatccttacgcaaactacgcagagcttcgtccgggaacagcgtcaatcatcacagatatcgagcacttcacatggactgacaaagagtggatggataagagagcagcaaagtcagatgctgatgtatattcttcacctatggctatatatgagtgtcatccgggctcatggatgagacatccgggcagggatgatgagggcttttatacatacagggagcttgcaaaatcactcatatcctatgtgaaaactatgggatatacacatattgagcttatgggtatttcagagtatccgtttgatggctcatggggatatcaggtgacaggctactatgcacctacatcgaggtatggagagcctgaggattttgcatactttgttgatcagtgccataaaaataatatcggagtaatcctcgactgggtacctgcacatttcccaaaggatgcgcatggacttgccaatttcgatggaacagccacatatgagtatgcagacccaagaaagggagagcatcccgactggggcacaaagatatttgactacggtaagaatgaagtaaagaacttccttatcggaagtgcacttatgtggatagaaaattaccacgtagacggactccgtgtggatgcagttgcgtcaatgctttatcttgactatggaaagaacgacggacagtgggtgccaaacaagtttggaggaaataagaacctcgaggcagtagagtttttcaagcatatcaatacactcatacttggaagaaatcacggaactgtaatgatagccgaagagtctaccgcatggccaaaggtaacaggcaaggtagaggaagacggactgaacttcagctacaagtggaacatgggatggatgcatgacttccttgattatatgaagctggatccatatttccgtaaaaataaccacaacaagatgacatttgcgatgagctataatgagagtgagaaatatattctggtactgtcacatgatgaggtggtacatctgaagtgttctatgctcaacaaaatgccgggcttagaaggggataaattcaagaacctcatggcaggatatgcatttatgatgggacactgtggaaagaagcttcttttcatgggacaggagtttgcacagaagcaggagtggagtgaggaaagagaactcgactggtatctgcttgagaatccggagcataaaaagatccagaactgggtaaaggagctgcttcacctctataggagaaaccgctgtctgtatgagctggattcaagctgggaaggctttgaatggataaatgcaaacgatgcagacagaagcatcttcagctttatcagaaagagtaaggatggcaagaataatatgctttttgtcatcaatttcacaccggtagagagacctgattacagagtcggagtgccaaagcacaagacatatcagctcgttttagatagtgaggatcctaagtttaccggcaaaacggtacaagagcctgtaaagaaggctgcaaagggcagaggcagggcagcaaaacagtcatataagaagctggactataaggcagtcaaatcagagtgtgacggcagaccattttcatttgcttatccacttgcgccttacggagttgctgtatttaaatactaatatatcggtaaatagcagggtaaaggaccgcgccaatttaaggcgcggtctttatttttgcgtattatatgtcgatatataaaaaagataaccattcagaaccaccccctcacatatgagcaaaaaatatccataaataaaggctgcagagatggtatatatgcagggcacggagcaggaaatatgcagatagagaatttgattaataaaagcacagatacgaaaaatacggacacaaaaaccataaatgacatgacagcgggtatgcgtgtgtcagactacataaagacagacagcagtgacaatatgtcaaaaaaggcggctgttgtcggttcgtcaaactctgttgatatgtcggatacgatatatgcaagaccacaggctaaaaacgaagccgggaacaacgatggcacagatatggcagaaaatctgctaaatgacatgaatcagacctcagaaaacaggcgaaatgatatgattgtcactgcaagcaccaccacgagtgatgattacaaagctgcaaaggatgacggctacgatgtcattgtcactgagaccgataagataaaagcagtgctggcaaaggcaggtgtagatatatccatatatggagatgatctgagcatggagcagcttacagacatcacgggaagccagactgaagcggccatgcttgtcaatcagatgaaagcatatgatattcctgctacagatgataatataaaggcaggtacagatgccatagaccgggcaaagagccttacaaatatatccaatgagacaaaggcatatctggtcagaaataacatgaatccgacggtttccaatgtatacaaggctacgtacagcagcagtcaggtacaagattacaggcagaaaaccaaaatgacggagatatcagatgagctgtttgaggagcttaagccacagcttaaacagatattagaggaagctcatatagacagtagtgatgagaatctgaatcagtgcagatggctgatagatgaagatatagccgttacacctgataatgtgctgcttgcgaatcaggtagactgcatcaacgcagcagaagaaaatgtgagcagtgatttttatgcaagggcagtgacagaagcactggcaatgggaaaaaaggctacagatgccactatgtcacaagatggtctgacatttgacatggcaaagaaagcctgtgatgtattaggtgaggcgaccgcagatgacattgtcacattagagtcagataacatacctgtcacgatagagaatctgtcaaagcttatagctgcaagaggcaaggatagtgcagcatcgcaagcctcagcgaataaagctgcggataatcagattacagacagccgggaagcaaggcttgtgacagctcaaagaaagcttgaggaagcgagactttccatgacagcagaagccaacctttcactcataaaaaaaggagtttcaatagacacagagcctattgaacgtgtagtggagctgcttaagcagcaggaaaataaatactacggagcgctgtttggtgagagcagtgtagaggcatctgatgatagggtacgtatgtacaataatgtctgtgatattttcaatcagatgaagcagcagccggcgtatgtactgaccctggaatccgctgatgacactgtgtatgagctgtatacagcaggcaaagcaatgaagcagtcattagaagcagcagcctcaggatatgagactcttatgacatcaccgcgggcagatatgggagatagtatgtcaaaagcatttcagaatgtggatgatatacttaaagagcttcagatagatacatctgaaagcaatcgcagggctgtgcggatacttgcgtacaatagtaccgacatcacagaggacaatataaagcagataaagtctgtagatgagcaggtgcagagagcattcagcgatatgacaccggcggtgacgattgagatgataaaaagaggcatatcaccgcttgatatgagcatgagtgacataagtgacactgccagacggataaaatcagaaaatcctgacgaaaaggatgagaaattcagcgagtttctctggaagcttgaaaagaaaaatgaaatctcagaggaggaaagagactcatatataggcatatacaggcttatttcacaggtggagcagtcagatggtgctgtgataggctcacttgttaatcagggagcagatattacaatgaaaaatctgcttacagcggtccgggtacgaggaaagagtgccatggactataaggtggacgatacctttgccggagtggacagtgtaagcagtggcattaaaattgactcacagatagaaagcgcatatcatacaaactgcctaagggatgtgcttgatacactttcacctgagaaaatggagtttatgcagtatgacagctggcttgatatgactccggagcagttaaggcaggctgtatatgaggcagacgaggataacgcactgtcagagcaatatgccacagaacagctaagacagttcaatcaggcagtttcggtgcctgagaacgtatatgcttttctagagaaatatgatgtaaaaacaaccgcggtaaacctcatggctgcgtcacggctaatgaaaaatccgtcagaggcagtaagaaatctctgggagcgtggagacagtgctacggcaagggctcttttggatgagactctcagacggttttctgagtcggtcaaaaatccaaaggagcttgcgcaggcgcaggaaacgctggctgatacagcagagcatgttatggattcgatgattatagaggataggcacaccggttcaatagacctcagacagatgaagctattatgcagtcagctaaggatagcttcaaatatgtcgagacaggaaaactatattgtaccaatagagactgcagacggggtcacaggtatgaagcttagtatagtaagaggcgaggataaaaagggcatggttgacatattcattgaggataaaaaatgcggcagagtagctgcatattttgaggcaaaggaaaactcagtatctgctatgatagtcacagacgatgagcagactaaaaagctgtttgaagataatatcactatgtttgaggcaggaataagtgatggtgaacagcgtgtgcgcatagatgtggcactggagcatgatatatctgcaaaagagtctaagatgtcagataatgagactaaaaagcagcttgatggcagtgaaagtgtccagacaaccagactatatcacatcgcagagcagtttattgtaaatgtccagagggtgattgcgcaagatagtctgtaacaccgatatatattgcatgtgccaggtcatcctgatagtttttgtcagtaagaagaagtgtctcagcaggattactcaagaatccacattctacgattacggtcggggatgtggattttttaagtataaagtattctttattgggcttaatgcttcgtggctttgcgacacaaagagaagtgtttaaagctccaaggacagaggatgcgagctcttttcctgcatcagaggcttcataatagaatacctgtggaccgcagcttgaattgtcctcaaagctgttttgatggatactgatgctgactgccacattgcttttagacatcagggcagttctctttgtgagatcatctgtctttggatgcttggaattatccggggcgaggtcgcagtcggtggttctggtcatgacaacagtaaagcctctgttttcaaacagctgtttaagagccattgcaatactcaggttgacatccttttccatgacgccggaggtggaaatcttaccgggatcacttccaccatggcccgggtctattacaataacagttgaattagtgtttttgccggtgttttttgcaagagcgcagacacctcttccgaggtagaaggacagaataaagagagctaaaataagacagtatttgtttttcttaataatgtacatatattttttcatataagatacctataaaaaacccgatgcacatagaaggcatcgggtgtgtttgtatattatatgattggctgatatcatttataacctataaaaggtactgagttagactgtagctgtaaaggtacggcctctttcagtaagccttaagcaatcagttcagatatttgataacagtatcccagacagatgaattctcaaagccaagcttccagaatgctgcaccggcgagcttattgtcgtcgacgagcttgagccttttctctaaagatgtagtgtcctcgagccataccttgtacagcttgttggatacagaccactcagcgtagttctgaccggattcctcatcaagagcagcagtggcattgtttgtggcaagctgtgctgcagctgcgtccatactatatacctgtgaggcaacagtgtactttgactgatcctcggtatcggttacggcatcatcgtcctcctttggagtgagctcccatattctggtataaaaaggcatgccgagaataatctggtcagcgggaacctccttcagagtggattcaacaccctcagttacccacggaatggaagaaactgagccggcatcagagcccttatagtgttcatcgtatcccataatcacaatataatcggcaaagtttgccatatcagagcgattgaagaacttgttgaagctggcaggtactgtgacatcaactgaaagtgatataccgttattgtgacactttatggcgagctctctgataaactcgatgtaagagtctccatatgctgcttctgtgatattttcaaagtcaatatttacaccatcaagctcatagttaaatgcagccgacataatctgattgatcagggtagttctcgtggatgtatgtgtgagcacatatgctgcatctacatcagtattttcaaagttgctgaacagtccccatacctcgatgccctgggaatggcagtagctgacataatccttgcttgctatatctgccagattaccattgttgtcatttaaataaaaccaagttggtgacattacatttatgcccttggttgatgaaattacctggggcactttactgtttgctgactggcttgttacctgattccaggcaagacagatatccttatccttcttgatatgcgtaaaggtctcttcctcatagtcaggattcgtaagcttagtttttttgctctcggacagagccttgcgctttatatatccaataacaccatcctcagtggcaaccttatcccatttgtcaccggaatcaagaatagtaatcttgtcatcctttttcacctcttttagaatagggctctttatgccgcccttcacgcggacctgggtagacttgctgacagttgcactgtctatttcatcccatttgcttgtgatgacgatgcgtgccgggtcatcatatgacttaaaggtgatattggagtactgttttacatagtctaaagcgataagcgcagagtcagaggtggctttcacaatcggatagccaaagtcattggtctgcttggtgacactgtagctattgctgtcagccgccgctgagatgatatcagatgcggttgtgtaaagaagcacattctcatttgcatcccagtaaaatctggaatttaatgagtcgtgaacaaatttgtaatcaacgtatatttttttatctattattttagccttgtaatcggatagctcattatttacaatgagagcagcctcatcatcagaagagatattgaaatactctttaagatcctctgtctttttcgtaggggtgtatttattgataagagcagttatacccattattattacaacgaggataataagtccggttactataagtgcaggcaataatttctttttcatgtgtaaaaatcctttcctattatttggtgtcgaaattgcttaagctaattataccattgtgaaatagcatattcaaataatatgaaataaatttgtaataaattaagaaatttgtttatgcattttggcgcggaaggagcaaaagcttcccccgcgcacataccttttctttttaaaatatgtcttttggttgtctttttgcatttaaacggggtaaagaaccaaaaatatgctgacatcgatttcttgtataattgagaaaaaatgatattaatcattaattattgacagtttatagaaattgatatttccggagctttccacacccaatttaattgctgatttttagtttcgtttaatttgataaaatatctgtaaaaattccaatatataaatatagtttattcttctataaaaatacctccgtctatatataatgattatgagtaaaaactgataagtaacaaatggccctatgtcatgaagcgctctgtggcattaaaagtataagccctccgaaggcttcggacataaaattgataaacagctggttaaagatgtcattttgcatcgtgatattaattcctttctgatatcttatccagagtgccaaacaggctggtatttatgaggaacgggtcctctaagtaaggaaagcctaccaccggatacttaaaatgtttatggttaattgtctttttcttttccacgagattaaacaatatttttacgctttctgaatcagttattttatttgaattgaatagctcgataattctgttcaaagcgccccggttccatttacttattgtacacacagcgattcttacgtcacacctcataaattcctttaaggtgtttggattaagtatgccgaaatcaataatcacacgctcgtatctcatgtttaaaatctcagttagtgtggacatgactgcgtgaggaaagaaatctacattcttataagtaaaaaccttttcgtctgctgtctttgacagtgaaagaatttcgtgtgtaccattcagctcaacataggcggttctatacatgcatttattgctcatataattacaaagagcaaggcttatatgtgttgtgcctacattgtgaacgctgccacagaccccaactaactgtggtgcagaatggactttcttaaatatccttttaaagtgtctgatagtgatgctcctccctttagttctaacagcttttgaatcagcgtttccttttgaactgagctcttaaacatatcgctgtcataaggaaagtgataaacactgcaattaagtagtggcgcaatcgcggaggcatcctgtctgctgcacatattacatataacactcagggaagctgtcatttttttgagaatagaatgattcctgtagatatcattcagatgccaaaagctgccgttacatacatataatacgagatccatgtcatatattttctcgttgcacacatcagtgccaaggtcgtatatctgtatagcatcctttggaatattaaactgtataccgtcactgtagtcgggtatgccctgaaagcttttgtaataataatatccgtttttctgcttaaaaatctgcagtccgtcgtgattaccatggcaaagtacgctttttgctgagtctatgtagataccatgatatccaaggatattgagttcgcaggtgagtgaaacggccacgtgggtggagccgcagcctctgtgactgcctaaaactgctattttgtgtatgagatgtggctgaccggttaatttttgaatttcctgtatttcctgatatagctctgcgacagtcacgtaacgcagtgatgcatcagatgttgttgctttttggataatatgctgaaacttatgggaaaagctgtctggggtaaaggtcagtatatactgcagaagctgacctaagctgtaaatgtctgccgccggtgtaattgtatcctcggtaaagcattcgggggcagagaattctatattcccatagtgattgaagttatttccatcctggataacatatgccgatacgccaaaatcgataagcttaagcttattgtgacatactataatatgctccggtttaaggtccctgtaaataatgggagtagatatctgtgtatgcagatagataaaaacattgcataattgttcacaaatattaaaaaataaacctggggaaattaactgctgatgaagcaaaaatgaatctaatgtctcgccgtcgatatattcctcgacgatatagtaaaaagcatcgtcctcttcgaagtcaaatatacgtggtatagacggatgctcaagagacttgagtagtcttgcttctgataatgcggattcggcgaaagcagaagatttaggaactttctttagagctctctcctgatccatagatatgtgtctgacaagcgtgacgctaccggagctgccggttccgagatctttaatcatctcatatttgtcaaacaaagaatgatttgtatttttcatacgctccttttgggtcgagcgcacatctcatggataacttataacatacctgtaaaataattgcaacactttttttatttttttttaataggcctcgcgctttacaatatgaccggtgtttattataatagttttacgatttacacggatattttcggaaaaggatgtgaaaaatatgaaaattgagaaggtaaatgataatcagatccgctgtactcttaccagagaggatcttgaggacagacatataaaaataagcgaactggcatatggatcagcgaaggcgaaaagcctttttaaagatatggtagagcaggccaattacgagtttggctttgaaacaaatgatattccactcatggtggaggcaattccactgccatcagagtctatagtgcttatcatcacaaaggttgaatatccggatgagcttgacaccagattttcaaagttttcagaggcagatgacgactttacggacttaggaaatgcaggacagcctccggtgataaagggagctgctgatattttggagctgtttgagcgtatcaagaaggaaaatgagaagacagctgacagtgagcagagcactgatgatattacagaagaacaggctgaggctgacgtagtcaagctgtttgtttttgataaatttgatgatgtgcgcaggatttcgcatgtgcttgacggcttttacagcggcagaaatgacttatacagggatgcttcaagcaataagtactatcttgtggctcacaagagtgagcatactccgaaggaattcaacaaagtgtgcaatattatttcagagtacgcatatcagaagaactatgtgcctgccaatgaagcatttttcaaggagcatggtaatgtgattattgaagaagctgccatccagacgctggcagtactttaacagaatattgattgcaaataaaagacggcctgcataagcaagccgtcttttcgtaaattaaccgaggtcgtgatcgatgaatgtgttgatttcaacgacaagatcatccgggtcaagtccgtgaaccatagcagcctcttcgattgtctccatctgtgatgatgggcatccgagacagtgcatgccgatatttaaaagtaatggtgccacgttctggtcaatctgaagaagatcaccaatcatagtgtccttagtaactctagccattattgtttcctcctattagtcttttaatgtgcctattataatacgatttgcatttaattgcaaattatactataaagattttttttgagtagttcgatatacttattagacaacggaatgttaatattacagcaaggatgcctgagaaattatcaggaaaggaaaacacatgaaaataaacaggaatatgagtgctgtcagggcaaataagcagctcctcggtacagaaaacagattatcaaagtctatgaaaaggctttcaagcggctacaagataaattcagcagaggacaatccggcaggaatggctatctccaacaagatgaaggcgcagatagaagcgcttgaccaggcaaaatcaaattcgtcagatgcgcagaatgtcatgaaaatagcagacggagcacttggtgaggtaagcagcatgctccagagaatcagggagcttgcggttcagggcgcttcagatacatattctgagaatgataaaaaggctttgcagtcagagatagatgagctcaccaaggaggtggaccgtatatcgggcgatacggagtacaatacaaagtcactgctcgatggttcgagtgatacacgcgtctatgtaaggcagaaggatgcaaatggcaatatgactcaggtgaacagctatattaccagaatcaatttctcagacaatgtggcgtcagataaatatgagcttacagtaaattcgctcgcaacacaggcaacaggaagtcttgcgtctgccacaaagcctgacgcagagggaacgatttccataaacggtgtgagtgtggctgtgaaggcagatatgactcaggatgagtatatccaggcattgcagaaggcagcgaccacagccggtactactatgcaggtgaatggtgatagcatcagctttttatcaaatgagtatggcagcgacagcacagtaaatatatctctttcttcatcgcttaaggctttggcaggtgcaggctatgagaatgctgacgatggaagtggaaatatgcagctcaaaagtaacggtaaggatgccgtggttacaggcggagaaaatctgtcggacaagacaataagagccgacggtaaccgtgtatatgtggtaggaaacagtggattttcaatggattttctactgagcagtgatatggatatgacagcgggaagcagcaatctgcagatagatatttcagatatcggaaatatggctgtacagattggtgcaaacgagggccaggagatgaaaatcaggataccggaggtatcatcgcagacactttatctggatacggtagatgtgactgtaaagggtggtgcagacaaggcaatgtctacacttgatgaggcgatagagtatgtctcaggtgtgcggtcaaggataggagccttccaaaaccgtcttgaatcagctgagagcagtctttctgagacttctgagaacatgaccggtgcatattccaatatcatggataccgacatggcaaccgagatgacggaatacgcggcacagaatattctcgaccaggccggaatctcagtgctgtctcaggcaaatgacctgccacagcaggtactttcactattgtcgaggtaataagcaatgaaaaatgaattgaagcaggagctcaccagaaggctttgtgcgtgcaacaatggcggactcgtgcttgttatgtatgatatatattttggcttttcagatgatgtaaaaaatgccctcgtgtcagaggacagggaagccttgagaaagggagtgtcggatgtacaggcggcacttgatgagctgatgggggcacttgactttaagtatcctctcgcaggacagctttatccactgtactcatactgcaagaggcttttttccacagtgctttactcacttgatgtgtcggtggtggatgaggccgacgtcattatgaaaaagctcagaaacagctttgaaacagcagctgccgatgacaaatcggctccgcttatggacaatgcgcagaaggtctatgcgggcatgacctatggaaggggcaggctcacagagagctttataaacgatgataacaggggcttccttgcgtaggaggcctcttttttagttcattaagcctcattaaacctcattaagccgcttggcacagtttaatagaaatttataccgcatggaaacagccttggcctgatagatgtagtagtcaattaaatcgggctcaaccacattttccaggttagtgtatacaatttgaagttcatctgttgttttcttgatgtcatcctgtaaggtcttgtaaccgtcatttacaggcgtttctttaaataatttcatgaattcctccaacaaaataagtcttaatacaagtataagcaaaagagtttcttctattcacagattttgtaaaaagtgcttttgacatgtgaaaaaccagtaaaatcaaggttttgactgtggattaatgtgttgggtttggctgcattttgtggataactaacaaaaagtatttattttaaaaaaagctatagacaaaatcgggagtgcgttgttataattcgtctcacgaaaggagaggtgatgaaaatacagtgattgtgaaattaatatcacacctcatgctgtatatactgcttacagtagcagcaattggggatttcaaaaattatagaatcagtaaccggctgattctgacgggacttggttgtgcgtttctatttcgcttagtggggggcaaggtagcgagcatcatctggtttcttccagatatagtttttccggttgtcattttatatttcttatatctttcaggcattttaggagccggggatatcaagttattttcagtagtatgtgcatttacaaatttaagatttaccgccttgtgcatggcagccgcttttgtggcggcagcgggatatggtctcataagtatggtgcttaaaaaggagctctttgtgcgtatgagggatggatttttatacttaaacggtatactgtgtggcagatttatgcggtaccgcggacaggggaaagctgttagtttcgcggtatacgtgcttttgggaacagccatggcagatatctggttttacggcatgaggtgatggaaggagggttaaagtaccatagatgaaaaaaatcagactaggaatttatattgaggattcagaatatggcgacagactgacatgttatttcatgaatcattataaggatcagctggagatacatatgtataccatgaaagagcagctggaacacttagagggcgagatagatatcatgctttcaagtgagcttgaccagtggaataacaagcatatcccactgatacagattgttgaggaaacacctattgagagtgaggagggtatatactttgtggaaaaatatcaggaagtaaaccgcatagtggaagagattttaaagcatgtgggcggtgaggtgagagaccttaagagtgagggctctttgataggtcagacgaggcttataagcgtgtattcacttgctgataatcagtaccagatgccttttgcgatgactctgtcctctattttgagtgagaatgaaaaggtactgcttatggattttcaggagaatagtggattatcgcggatgcttgagcagagtgtggagcataatctggacgagctattggtgatggccgaatccggacgatactcgaccaacaggataaacagctgtatcggaagaaagcataagctggattatgtatatccgattgaaaatacagagtgtctgtgtgaaataaatacggtaatatgcaacaatctgcttcagatgcttggcaaggaaatgcactatgactgcatagttctcaatatgggaacaagatttaagggcttttttgatattcttgacagatgcagtgatatctacctggtacagaaaaaaggcggaatcagccagtggagagagtacgagtttacagaggaactgattgaaagaggcttaagcaatgtagttgagaggattaagctgattgagcctccggtcatcacgacaccggtatctacatgtgataagcttgtagagctgtggaagtggaatgagtttggagatgtcataagaaacatgactcggggtatttcgtgtgctggatgattttggacagagaataagagatattatactttctgaaatggatttgtccagagagctgagtgatgaggaaatatgtgatttaatcggaagcgtggtttcaagagaggcacgcgacagaccaatgactataaaggatagagcggagcttgagcgcaccatattcaactctctgcgtaagcttgatgtgctgcaggagctggtggatgacagggatgtgactgaaattatggtaaacggtcccaatgatatattctatgaaaaagccggaagaatccaaaggttcaagggtcatttttcatcggaagagaagctggaggatgtgatacagcagattgtgggacgccataacagggttgtaaatcaggcatcaccgatagttgataccaggcttagtgacggctccagggtaaatatagtgctaaaccccatatctataggcggctcggctgtatcaatcagaaagtttccggagcatcctatgagcatggagaggcttgttgagatagaagctctctcgccggaggtggcaaggcttctacagatactgacgcaggccaaatacaatatatttatttcaggtggtacaggctccgggaaaacgaccttcctgaatgctctgtcacaatatattcctgatgatgagagaattattacaattgaagactcagcggagctgcagcttctgggagctaaaaatatagtaaggcttgagaccagaaatgcaaataccgatggggttactccaattacaataagagatcttatcaggacggctcttcgtatgagaccggacaggataatagtgggcgagtgcagaggtgcagaggcgcttgatatgcttcaggctatgaatacaggacatgacggctcgttgtccaccggccatgccaattcaccacatgatatcatttcaagaattgagactatggtgcttcaaggtcaggatttcccactcaatgcgatacggcagcagatagcatccggaatagatattattgtccagcttggcaggctgagggataaaagcaggagagtccttgagatatcagaggtggatggatttatggatggtgaaattgtgctgcatacgctgtatcgttttgaggaaaccgctgttttggacagtgggaggatacagggctttttaaagaaagaagggacactttgtcacaccgacaagcttatggcagcagggcttagtgtataggctgttatgtggcatttaaagtaagaaaggctgtagctgtcagtataggaatatatgttactgaacagttatgaagggtttgattatatggattacagcagatattccatgtccataaaggattgggggattgttttcataaaaagtatggctgccacagtgattatcgcatatttgttttatgacagtcctattgttgttattgcttttccggcggtgtttgcgtattgtgcaaagctgtgcaggcaggagggtgtcagaagacaaaaggaaaaactaaatgaagagtttatgaatgtacttaaggtattgagctcgaatatgctggccggatactctgtggagaatgcatggcaggaggctgaaaaagagatggagctcatgtatgggaatgattccattatgctgtctgagatacaggagatgaacaggcagataaagatgaatcagacatttgaggcggtgctgtcagaatttgctcatagaagcggtctggaggatatagtcaatttttctgatattttctcatttgcaaagagaagcggcggcagatttgtggatatcatagagtctaccacttacaggatgtggacaaagtatgataccaaccgacagatagaggttgcggtttctgccaaaagacttgagcaaaagactatgaactatattccgatatttcttttggcatttttaaagctgtcttcaagagattatatgtctgcactatatggaaacctgatcggggtaatctttatgagtacctgtcttttagcctatgcaggggcaattaaactggcaaagaaatttttacaggtaggaataggcatatgacgggaggaaagaggcttagaatagcagcattatttgttatagttttagtttttgcttttatcatggacatgtcgtcaaatgctataactgataatacacttatacgcaatgatacaggtgacggagatgcagtatatgacctggtgctaaatgcggatggactcgatgaggattacagctatcagctgaaggttagtgaggagcagccttcggataaacaggcgaatgagctgtttacacaggcaaaaaaagagatagacgacagcttttgcgaaaaaggccagagtgtagagcaggtcagaggacatataaatatgaaggaagcatatgcccaaggagctgtggaggcagagtggacactgagtgactatgatgtggttgatattaatggagatgtgaaccaggaggcatttgaggagactgatgatgaacagggaaagctgattagcgcaagtgttgagctttcctgtggcgaacacagacagctgtatgatttctcatttgtggtatttccggatgaactggacgcaggcgagcgcctcataaagggtatcaacagacatattgacagtgagatgtcaaagacagggactaaaaagctcacactgccggatgaggtagatggagtaaagcttagctggtcgcaggaaaaaagcaatactgcagctaaaatagccatgcttgaagttgttgttatagttcttctggtgcttgagaaaaaggaaaaaaagaagacggcgcagaaggatagaaatatacaactgcagctcgaatatccggagatagtcagcaaaatggctgttttgatgggttcaggaatgactgtggagcagacatggaataggattaccgcccgttatcttgatgagcggaaaaataatgataagaatattatgcccgcttacgaggaaatgcttgtgacggagagggaaatctcagatggcgtgacaggcagaaaagcatacgcaggttttgcggaaagagtaaagctgccatgctatcagaagcttgtacgcattattttacagagtattcacaaaggaagtaagggtgtatgtgaaatgctcgagaaggaatcggaggatgcatttgatgagaggaggcttttagccttaaagctgggtgaagaggccggcaccaaaatgcttatgccgatgatgattatgatggctatagtcatagcaatagtaatagcacccgcaatcattgattttaagatatagaaaggaaaaattatgttaggatttaagaattttttattagatgaggatggtgcaggagtagtggaaatgatactgataattgtcgtgttaatcggtctggtgctgatttttaagaagcagcttacaacacttgtaaacaatatctttcagacaatctcaagagaggctggtaaagtgtgagaggcagtataacgatatttgccacaatgcttctcatgctggtgtcacagtttctgtttactgtactggaagccggaaggaatctgacacttaccaatatagcatgcatgaattcagaggctgtagcagagtcagtttttgcgcagtattgcagaccattgtgggatgaataccatttgttagcatatgacgccggaagtgacgcaatgggcaatgtggatatcgaaaatgtcaagtcgtatatgaagcagcttacgactgacaattttaagataagcgattcaggagattttgccgggggtactattgtaaacggcaccagtatgctaaggttgtcaatggatgagctcgaatccatgaaatatgtgctcatgacggatgatggtggtgatgtgtatacaaatgcggttgtttcatatatgaagaaaaatattggttatgaaacagtcaaaaatctttacagtcagtatagctcattgaatgaaaacaagtctgcgggtgagtatgatgacagtaaaatagatagtgcgttaaaaaccttaaaggataatgcagctcatgaaggcggaggcaaaagcatagcgaggtcgtcaccgccaagagtttacagtgctccttcatcgttttcgaaagcaaagcagacgtcagaaagtaaggaagaaagcacagaaggcggtaatgcaatagaaaatccgctggtcaaggtgcagaaagtaaaggcatcaggcatattatcgcaggtggttgatgatagcacggtgtcaggaaacagtattgatacatcagccagagtgtccgggcgaagtctgcataaaggaacaggggggtggtctgaaagtagtgatgactggtatgcgaaagtacttatgcagcagtatattctgacatatatgagctgttacactgatacaaatccaaatcatgcccttaactatgaggtggagtacatcataggaggcagagcgagtgataaggataatctgaagatcgttatagcagaaatactggctctgcgtgcggctgccaatatggcatacctggcaggaagcgcatcaaagcaggcacaggcgatggctcttgctgcaattatcggtggaattactctgacaccggaggtaattgaaggggtggaaaagggaattctggcggcctgggcattctgtgaaagtgtgctggatttaagggcacttttggatggggataagattccactgataaaaagtgatacgtcatggacatcgagtctgtatggcatgacaagcatgctcacagggcaggtgaaggcaaaaagctcaaatgaaggaataggctacaaatcatatctgggtatgctgctttttacaaagagcatgaaaaatatagcgtatcgctcgatggatgtgcaggaggctacagtgcgtatgaccggtgcgcatgaaagctttaggatggacaatgcaatctgtgagcttagtacagatgtaagctacaaatatcatggcatatttttatgctttgtgaatctgttagatggggcagataacgagtataccattaaaaataaggcaaagtattcctattatggacgatgacgaaataagaaaggcaggtgtatgaaggtgtcttttgttaataaagtaaagttccacataaaaaaactttatagaaaggccaaactcccaggcgatgatagttctcaaaagatgccctcatgcacctgcctgaaagcgtcatatacacttgaggctgcggtaatatttccgcttgtagcaggcttttttgtatttatactttttttcttcagggtggttcaggtggagtcgcaggtgaaggctgctctgtattattcatccaggatgagtgcattagcgagcagtgcaaacgattcgtcagttgtatcagtggccactgcagaggtactattcaggagccaaatatctgactcgaagcacattgatacatacgtgagtggtggaaagtatggagtgtcactgcttggctcaagtatggatggtgatgatgtctcgcttaaggcaaagtacaaggtaaagcttccggtgagcttttttactgtggacggaatatggatagaggattatagcaacagcaggaaatggacaggaaaaaatcccggcgaaaaaacggacccatatgtattttacactgactatggcagtgtttatcacctgtccgagcaatgcaattacctggatctgagcataaagagcatcaaatggtcacaggtgggggcaagcagaaacaaagatggtaggaaataccacgcatgttactgtgccgcggataaaaaaacagaaggttcaacggtatttataacagattatggcatgaactatcacggaaagcttggatgcagtaagcttaagcggacagtacacaaggtgcataagtctgaggtagatggcaaaaatctgtgcagtaaatgtaaaggagaaggaacatgatacagcttatcattttacttggaataatcagtataattgacttttcaaccaaaaagataccggtagttgtattggtagtaatgggtatggtgggtattgcaagctctttttatgcaaagcagtcaattatatcagtgactgttgccctgattcccggtatagtgcttatggcagctgcatttcttacaggagagcagataggctatggagatgcagctgttgtgacgattatgggattgtttgtgactgctgacatagtgtgcagcactatggtgatgggactgacaatagcgggaacaatctcagttattttaattgcatcaggcagggctggaagaaagaagcagattgcatttacaccattcctactgcttggatatggactgacggaggtgtttatgtgactgaaaataaattaaatgtagatttatcttatggactaaaaggcagttacacagtggaaggaacgattattatacctatatttattgttatgcttgcgatagcgatgaagatgggacttgtgctgtataacgaaatgaaagcagacagctcttatgagtatgctactgatatgtggctggtggatgatttctataattatcaggttttgaaagaggtagtaaatgaattctaatgaaatagtatatgaaagaaagatgacaggcagctttatgaagctgcgttgtgacgaggtgaggccgttagatgaaaagatattgctgaaaaacaatattccgggctttctgcctatggagaagtgttatgtgaataatgaagggcagtactggtatgatatatccggagtccagtctttggaaatgcgctgccagtacaatgacataaagcttgagtttcttgaaaagcttgtggtgagtatctgtaacaagatggagcttttggagaatcatcttgttagcacagaatctctggtgcttgatcctcagctaatacacataaaaggggtaaatcaggatgaggaaatatattttacagcatacccggcacagatgaaaaccatttgcaatacattccagcatttgatggagtatatgctcacaaagcttgatcacagtgatgctgaagcgatacatatagcatatggcatatacgagaaaaccataaatggcaattacagtatcgctgatattagaaatgccataatcgaggagcgacagaaaaaggtggcagaaaagccggtggaggaggtggttgcgccgatttcacagccacaggtcagagtagaggagcctaaggagcagataaagcctacactgtacgataagcttcgggtgtatctgctggagcagctggatatcaggctgccggagcgaaagaagcaggcgtcagtgatagaaaagtataaaaaaacggacataaacagaaaatggtttaaaaaagaaaaacgaaaagaaaatcgtgaaaaggtagatgacaccatgcttatacacccaagcccagaggctgcaccggagcctgtaccgcgtcagatacaccccactgtatgtctgagcgattacagggagcacccacagggcatgcttttgtatgagggcatggaaaaccgcagtaatataataatagacaaagattgtacgcgtattggtcagggcgatgaggccgatgcagtaataggcaaggatacaataagtcattttcatgcagttataaatagggaaaaccaggaattttatctggaggatttaaactccacaaatggaacctttgtgaataatgaggtgcttgcgtacaagcagaagaagcagctcaagtcaaatgatatcatcagatttgccgatgttaagtaccggtttgtataattgttgcaaataagctccttaaaatttataataagaaaaaagtatttaacaggaaaattaaggagaccccacaaatttgcagaatataaaaagctttgatacaaaaccatatatgacaattggcataatagtggtaaatataatagtttttgtgctgatgagtttatcaggcagcacacttgatgcacagtatatggctgcccacggagccatgtaccctgagtatataaaggatggccagtattggaggctgctcacttctatgtttatgcattttggattgatgcatatacttaacaatatggtggttttaggcgctgtcggtcagatagtcgagaaggctatggggcatgtgaagcttctgattacatttcttgtgtcaggcatatgtggaagtgtattatcgtacatcgttatgctttataataatgactttgcggtatcggcaggcgcctccggggcgatatttggtctggtgggagcacttgtgtggatagttatagcaaacagaggcttttatgagggcatcagcagacagcaggctgtatttatggttatactcatgatatactatggagtttcaacgcagggagtggacaattgggctcatggaggcggacttgcaggcggatttgttatttcaattgttttatatcgcaaaaagagatataataaatataatatcaactaaaaattaatggtaggagaagctacatgaagataaatatttattatggtggaagaggcttactggatgatccgacactgtatgtgataagcaggatagaaaatgtgctaaaggagctccgcgtaaaggtggagagatacaatatctatgagcacaagaatgaaatagctacattgccacagacctttaaggatgtagatggaatcattctcgcaacgacggttgagtggcttggcataggaggatacatgcagcagtttcttgatgcatgctggctctacggcgacaaagaaaagataagcaatacatatatgcagcctattgttatgtctaccacatatggagagcgcgaggcagagaccacactatgcaatgcatgggagatacttggcggtctgccgtgctcaggactatgcggatatgtagaggatattactacgtttcagctcaataaggagtataatctcataatagaaaaacgcgcggagaatctgtatcgcacgatatcccagaagattaagagtctgcctacaagcaatcaggcagtgaagcaaagtgtactcaggacacagcagctcaatctcaccccacaggagagcgaacagctgtcgaagtatgtgtctgatgatacatatgtaaagcagcagaaggaggatatcgaggagcttgcaaccatgttcaaggacatgctcgggcagcaggcatctacagatgacatgccatatataaaggagcttgaagcacattttattccgcttcgtgaattcaaagcctgctattcatttaatatagaaggcattaaaaatccattatatataaaggtggatgaggataagctggatatacactatggcgaagaggatatagtggatgtatacgccaaattttcgaagagtatcatggagtctataatagatggtcacatgaccttccagagagcatttatgaccggagaaatgacagcaaagggtaatttcaagacactgcgcatgcttgatcagatatttccgttttaatgggctttttgattcttaacagttacaaaataattatatatatgaggtgacaaagatgaaagatgacaactgtattttctgtaaactggcaaatggggatatcccgaccaattcaatctacgaggatgatgatttcaaggtaatactcgatgcaagtcctgctacaaagggacatgcacttatccttccaaagcagcattatgcaaatatttttgagattgaggatgagacacttgccaaggcagcaaagcttgcaaagaagattatgacacacgagaaagatgtgcttggctgtgaaggctacaacctggtacagaacaatggcgaggtggcaggccagacagtattccatttccatatgcacctgattccaagatatgagtcagatgacaacaaaaatgtcatagagtggaatcacaaggagttcactgatgacgagatgaagaaaatctgcgacgagatgagcatgtaatagctgttaatagttacacattattaaaaaataaaaagcccggatatgcaaatgtagttcatatccgggcttttcttttttataatattttataatatgcaatgacactaaaaattgaccctatgacgatttcttcacctgagagttaatcaaatcgattatagtggcgatggaatccatctgaccgctttttgccatggcatccttatatttatccctgttgccgtacacctcttttactgcgctaagcagagaatcctttgtgagctcctcctcctcgatgacatatgaaaagccctgctttttgaaggattttgcatttaatacctggtctccgcggctggcagcagcagaaagaggaatcaggatgtttggcttgtgcagagcaagcagctcgcagatggagttggctccggctcttgagatagccatgtcagccagagcaaacatgtcggtgagctcagcattggcgtactcaaactgtgcatagcctgtgattccggcaagcttgttgtccagattgccctttccgcagaggtgaatcacatagaaatcctttagtagttcaggaagaatctcacggacagcttcattaacttttttagagccgaggcttcctccgatgataaggatgacaggcttattgtggtcaggaaaattacaaagctttatggcattttccgcaacgccgctaaaaagctcgcgtctgataggtgatccggtgagcacagccttgtctgcaggcagatatttcatggtctcagggaaattgcagcagacctttttggcaccctttatggcgattttattggcaagtcccggggtgatatccgactcgtggatgatggcaggcacatggcagtgctttgcggcaagcacgacaggtacggaaacgaagccgcccttagaaaatactacatcaggcttgagttttttcatgaggcttacagcctgaccgtagccctttaacacgcggaacgggtctgtaaagttcttccagtcaaagtatcggcgcagctttcctgatgaaatgccgtgataaggaatcttctgggcctcgataagtcctttctccattccgtttactgagccaatgtattcgatatcgtatccggcctccttaagtgccggcataagagcaatatttggagtgacatgacctgcagtaccgccacctgtcataactattttcttcatatatatgtatcctttcttgcattcctgtttgtctcatatttatattatactcaacacaataaaagtcaataccaagttaccggtgaaagtttgccctgcaataccaaacaaatgtcgaaacttgcgaccgataggaactgttaagttcaagtgaattggttataataatcaatagtacatcatcctgcgttataggttaagttaaattttgaatgatgtatcggaaaaagaatagtagggaggacacattaatatggaattatcaatggacaatatggacatcgtggcaggaggcatacttgcgataatgcttgcacttttcatgctgacagtcattgtgaccttgttcgcactctcacacaggataagacttttgagcaacgagatttataaaatagaaaaacaggtgagcgactacatagacgagctgtcgagaagcgaaagcgacaagctggagatagagcataaggcacatcagaatggggtgatttcatcggtgctgcaggagatttttccatgaaatttgacaaaatgctattactgtgatattataccgactgtaacaaagttgtaacaaatgcaacataggtgtaataaacgtaacaaaaacaacatatactacaccatatggaggattatatgaagctaaacaaaaaagtaatcgatagcattacggtctgtggactgtgcgccatgctgacggttaccgcggttactaacagcggacgctctgaggtcaaagcagaggataaggtgctagcaaacactggtttagagcatactggttataatagttatgctggcgtggcagcgactctttttgattatgagaagggtctcacagcagagaatgctgttacagtagaaaaagaaaatgttgagatggtggcagcagcacaggatgcacagcaggaggcacagccacagctcacacaggagcagcaggaatggcagacaaagcttatgccaaacgttgaagaatcactcaacgtaagagcacaggccgatgaacagtcagatattgttggaaaactatataaaggaagtgtggcagacatcgtagaaaacgatggcacatgggctcacatcaagtcaggaaatgtagacggatatgtcaatgtatcttactgtgtgaccggaactgacgcactaagctatgcttacgacacatgcggagaaatcgccacagtaaatacagacggacttcgtgtgagagagacagcagatacaaacagcaaggccttagaggtagctgaccagggcaagacctatcaggtggaccgcgcagcgcaggcaccggatggctggattgcagtagtcagcgattcacagacaggatatatcgcagcagattatgcgacactttccctcaacacaagagtgggtatcacaattgaagaggaacaggctcagatagctgcacagaaagaggctgagagaaaggccgcagaagaaaaggcagcaaaagaagctgcaaaagcagcaaaggaatcaaagaaaacagagaccacacagggcgaggcggtaagtgcaggagcagatgacctgacacttcttgctgcaattatcgagtgcgaggcaggcggagagagctatgaatgtcagcttgcagtaggagcggcagtcatcaacagagtaaagagcggctcatatccaaacagcatctcaggtgttatttaccagaaaggccagtttggaccggcatcatcaggaaagctcgcaagaaagcttagcggacgcatttcttcttcatgctacagtgcagcacaggaggcaatgtccggagtggacaacacaggaggatgtacatccttcaatgaccatggctcaggaatatcaatcggaaatatgaagttcagataatatacagccaatacaaagaaataacaaagaggctgcaaatcaacaaagcttgttggtttgcagcctctttaattatttgtacggcgtggttttacagtcagagcgtcaatgcttcaaacctcttgcaacataccacaaaatagagtaaaatgacatcattatagcaacctacagatataaattatagcaacctgcatctataaacgatgcaaataaaacccaggaggcaagagcaatgcagttaaagggacgaaactttttaaaacttatggattacactccggaagagattacttatctgattgacctctcacaggagctgaaggaaaagaagaaaaaaggcatcagacatgatgaactcacaggcaagaatatagcgctgatttttgaaaagaccagtaccagaactcgctgctcttttgaggtagcggcacatgaccttggaatgcatgtcacataccttgacccgagcggttcacagataggcaaaaaggagagcatcgccgatacagcgcgcgtgctcggcagaatgtttgacggaatcgagtaccgtggatacggacaggaaatcgttgaggagctggctaaatacgcaggcgtaccggtatggaacggcctgacaaatgagttccacccgacacagatgatagcagatatgcttacaatccgtgagcacctcggcagactcaagggcgtgaaatttgtatacatgggcgatgcaagatacaacatgggcaattcactcatggtcacatgtgcaaagcttggcatggatttcgtggcatgcacaaacaagaaatatttcccaaatgatgagcttgtaaaatactgtaaggacgttgcagaaacaaccggcgcatcaatcacactcacagaggatgtggcagagggcacaaaggacgcagatgtcatctacacagatgtgtgggtatcaatgggagaaccggaagaggtatgggcagagcgaattaacgacttaaagccatatcaggtaaatgcaaaagcatttgaaaatgcaaaggatagcgcaatctttatgcactgtctgcctgcattccatgatttaaagaccactatcggcaagcaggtctatgagaagtttggactgagcgagcttgaggtgacagacgaggtatttgagtcagagcgttcagtggtatttgatgaggcagagaaccgtatgcactcaatcaaggctatcatgcgtgcaacacttgcggactagtacggcaagcaatgaccgcaacaaaagattgacggaaagctaaggaataaagtatgaaggaagaaatacttaggcttctacgcagcgctgacggctatatttcagggcaggagctatgcaaccggttcggagtatcgcgcacagccgtgtggaaggccataaaccagctaaaggaagccggatatgagatagaggcacaacagaataagggctacaagctcatggcagcgccggatctgatgacagaggcggagataaaaagcctcatgcacacagactgggtggcaaaggaagtgctgtattttgatacaatagactccaccaacatcaaggctcaggagcttgccgaaaaaggctatccgagcggcaccttagttgtagcggacaagcaggagtcaggcaaggggcgccgcggccgcagctgggtatcgccgtccggcacaggtattttcatgacacttatgataaagcctgatatcaatccaaacaatgcatccatgctcacgcttgtggcagcgcttgctgtcgcaaaggcaataacaagcgtaaccggcgaggaagccctgataaagtggccaaacgacattgtgataaacggcaaaaaggtgtgcggcatactcacagagatgaatgcgcagtttgactatatcaaccatattgttgtaggtatcggtatcaacgtgcacaatgagagctttccggaggaaatcagtcagatggcgagctcactcatgatagaagcaggtggcaaaagatttcaccgtgcgcagataatcgcagagaccatgtcatactttgagcagtattatgacacatttttaaagacgcaggacctttcagccctcgtcagggagtatgatgagctgttggtcaacaggaacaaatcagtaagggtactggatccgaaggagccgtttgacggaaaagcgatgggcatcacgcctaagggcgagctgatcgtggacacatgggaatcgcgtaagctggtttcaagcggagaagtatcagtgagaggaatatacggatatgtctaaagaggtagtactttgcgtgtcaaacgcatatcagaaaaaatattatctgaacgagaattttaacggacttccacagacaataagggacgagctcaaaatcatgtgcgtcctgtatacagaggatgtgggaggcatactggagctggtgtttgatgaggacggaaacctcgatttcagaacatcctgcaaggaaaacgactttttctatgacgagataggaagcgtgctaaagataaagcagtaccgcaacgagcgaagagagctgctcgagtcgatagagacgtattatcgcatagtatttttgggagaaggactcgaggaggaataacagatgattttagcactggacgtaggaaatacaaacataacatgcggcgtgtttgatggtgacaggataaaagcaagctttagaattacaaccaaaatgccacgtacatcggatgaatacggcatgcttctgagcactctgcttgaaagaaatcaggtaggcatggacgacatacatgatgcaatcatctgctccgttgtaccgaatatcatgcattcactgcagaatggcctcataaaatactttaatatcaggccgataatcgtggaggcgggcatcaaaacaggcatccgtatcgccacaccaaatccgcagcaaattggcgcagaccgtatagtagacgccgtagctgcatatgaattatatggaggacctgttttggtcatagattttggcacagcaaccacctacgatatggtcgatgaaaacggtaccttcatgggaggaatcacagcaccgggcatacgtatctcagccaaggcactctgggaggatgcggcaaagcttcctgagatagagattaaaaagcctgataatatcctcggaaaggacaccatcaccagcatgcaggcgggacttgtgtatggacagataggacagacagagtatatcatcaacaaggtaaaggaagaaacaggcatgtacgatgcaaaggttgtagtgaccggcggactcggcagaataatatccaatgagacagaaaacgtggatgtatacgatccggatctgacattaaagggcataaacctcgtgtatcgcaagcagaaccgcaagggagtgaagtaatagtatggatattcatcagatacgaaagcttcagataggaagtgtgacactcccaaacaacctgatactgggacctatggcaggcgtgacagacctgccatttcgcttattgtgcaaggagcagggagccggccttttatgtatggaaatggtcagcgccaaggcaattttgtacaaaaacaaaaatacagagtcgcttctttcaatagatgaaagagaaaagcctgtttcactccagatgtttggctcagacccgcagataatggctcagatagcaaagcagatagaggaaagaccgtttgacatactggatatcaacatgggctgtccggtgcccaaaatcgtaaacaacggtgagggctcagcgctcatgaaaaatccgattcttgcaggtcagattatagagagcatagtaaaagcgatagataagccggtgaccgtaaaaatacgaaagggcttcgatgatgagcatgtcaacgcagtagagctggcacatgtggctgaagaaagcggcgcaagcgcagtcgcagtgcacggcaggaccagagagcagtactactccggtaaagccgactgggacatcataaggcaggtaaaagagactgtctcaataccggtcataggaaacggagacttgctttgcgcagaggatgtcataaaaatgcagaagcagacaggctgcgacggctttatgatagccaggggagcgcagggcaatccatggattttctcacagatactgcattactttgagactggcgagcatcaggaaaagccatcctttgaggaagtacgccggatgatactgcgccatgcacgcatgatgatagagttcaagggcgagtacacgggaatacacgagatgagaaagcacacagcgtggtatacggcaggatatccgcattcatcaagactgcgcgcggcagtgaatacggtggagagcttagaacagcttgaagagcttttgtataaggaaaagcttaaaaattgaaatcggtcaaatccttgacagagtggggattttcaattataatacacgcgttaaaataggctttacgatttaataaaacaaacttcccacatttagggtattgtggttaccggccgagcatacagtttattcctcagaaaaatatgaagttaaccacgggtgcgaatcgcggatagagggtttttctttgctgcggggtttccgttgccgggggttatggaaacccgtggcagttcatattttgtcttcggaatatactgtatactttccggtatattaagtctttgaagtgggaagtttcattttagcaaatcaacataataaaataaaaggaagatagaagggtaagaatcatggataacaagaaaaatattctgacatatgcaggtcttaagaagctcgaggatgagcttgagcatttaaaggttgttaagcgtaaagaggtttcccagaagatcaaggaggctcgtgagcagggtgatttatctgagaatgctgagtatgatgcagctaaggatgagcagcgcgatatcgaggctcgtattgaggaaatcgagaaaatccttaaaaatgcagaggttgttgttgaggaggaagttgaccttgacaagatttctatcggatgtaagatccgcatcttagattgtgagtttgatgaggagcttgagtacaaaattgttggttcaacagaggcaaacagcttaaagggcaagatttcaaacgagtcacctgtaggtaaagctcttcttggaaagaaagtcggagatactgtaactgttgagactcaggtaggagagctcacatacaaggtactcgagatccagagagcagaagagaactaaaagaggtaaaaaatggcaaatcagaataataacaagggtggacagcagcaggacgtaaaccagctccttaaggtccgccgtgaaaaattacagaatttacaggaagcaggaaaggatcccttccagattacaaagtacaatgtcactcatcacagcagcgatgtaaaggagctttacaatgctcatgaggctgagattctcggtgacagaaaggctccggatgttgagggcttggatgacgctgcaaagagagaggtaatcaacaacgattacaacgagagaagagaaatcatggatgcaaagccaatcgaggtaagcattgcaggacgtatgatgttcaagcgtgtcatgggtaaggcttctttctgcaatattcaggacttaaagggcaatatccaggtatatgtggcaagggacaatatcggagaagactcatacgcagacttcaagaaatcagacatcggtgatatctacggtgtaaagggcttcgccttcagaacaaagacaggcgaaatctcaatccatgcagaggagataacactcctttcaaaatcactccagatactcccggagaagttccatggactgacagacacagacaccagatatcgtcagagatatgtagaccttatcatgaatcaggagagcaaagaggtatttatcaagcgctcacagatactcaaggaaatccgtaacttccttgcaggccgtgatttcatggaggttgagacacctatgcttgtttcaaacgcaggtggtgccgcagcaagaccatttgagacacactacaacgcattgaacgaggatgtaaagcttcgtatttcccttgagctttacttaaagagactcatcgtcggaggacttgagcgagtatacgagatcggacgagttttccgtaacgagggcgtagatacacgtcacaaccctgagttcacacttatggagctttatcaggcatatacagactacgagggcatgatggagctgacagagtcaatgttccgttacctcgctgagaaggtatgcggttcgacaaaaatctcatacaacggcgtggaaatcgaccttggaaagccattcgcaagaatgacaatgatagacgcaatcaagaaatacgcaggcgtagacttcgaccaggtacctgatgatgcagccgcaaagaagcttgcagacgagcatcatatcgagtatgaggagcgccacaagaagggtgacattgtaaatctcttcttcgaggagtactgcgagaaggagcttatccagccaacatttatcatggatcacccaatcgagatatcacctctcaccaagaagaaaccaagcgaccctacaaaggtagagcgttttgagctgttctgtaatacatgggagatgtgtaacgcatactcagagctcaacgacccaatcgaccagcgtgagcgtttcgcagcacaggatgccaacgcagcagcaggcgatgatgaggcagagcacacagatgaggacttcctcaacgcacttgaaatcggtatgccgccaacaggtggaatcggatacggaatcgaccgtcttgtaatgcttctgacagatagccaggcaatcagggacgtattattgttcccgacaatgaagagcttggataaataaacctagtgtttatgcggggttgaggcatttgagtacgtcaaaggacgcattaaaagacgtattttggcatagtcatttacatcagtatgaaagagtacacaatctgaaaagaaaaagattcaatcaaatatgaactactaagaggacattttctaaagaaatttagaagatgtcctcttttttgcgttatggagaaaatacgtcatttgttatgaagtcaaagtgaaaggagcacagcaatgaatgaatcaaagaagaaagatagatatgaggatgcaaaaaagtttgtaagatattcagatggtgcaaagatgtacagtatgggaatgacaaaatttcaagaagtggctaaggatgccaaggcttgttataaaattggtcagcttgtacttgttaatacagaaatattggataagtatcttgaaacttttcatattacagattctgcgttttataagtaggtgatgttatggtaaatacattgagtggttcagtttgtgcctatagaaaagaaactgtaaaaccaagatttattcgtattgatgaggtaatggctttattagatgtaacacaagatgaggcaatggatatagcgttggctgctggagcaagatatcagcttgcaaagattatattagtacataaggaaaggttgatgaaatttatgaaacattctgcaagagttcctagttcaaataaaattgtggaaaagaagtttgtgagaatcggagagggttcaatgacttacagcataggacatcatagatttatcgaaatggctagagcagctggagctgtatataagataggcgaagcaaaaggaaatactattctgattaatctggaggtgtttgatgaatatatggagcaattcagagaaccgccaacagaaacgaaacatccattgccaaatgtgaaaggagactgatgaatgagttactcatataagtgctattcagatacaaaggattttatgaaaaaatttgtcaatgcagaggaaggagcgattatttatgggataagtaaatcgagaatcatagtaattgcgagagaggcaggagcagtctataaagtcggtaattcagcattaatcaatacggaattatttgaaaaatatcttgaacgattcagagagccggcaagagaactgcctaagcatacatggaacaaattaaaggaaatgacaaatacaccaaaaactggtgaaaattcgtaaaaatacaccagtggtgtcacttccgtaaaattaaagtgcattgtagaatatcaattgtccaagagagattggacataacaattgaataatcagttacagatttgcaaagtagtttgcactgcagagtatctgtaggtagtaaatttacggggcatgtacctggaagatgaaagtcacagctatcatattagtagcctgatggatcgaaagatgaagggtgagaagttggatggaaatctggtaaaagggcgcaagagatccggtggatctctgctctgcgcggaccgaagcgaagcgtagaccggcatgttgcgtaaggataattaaccacagagggcgagaagttcgtccttatcctcaaaaggctaaaagaggagatagtgcttctgataattcagaagggcgtcgtgaaacacattttgtggctcgtctgtaactcccggaggtgagaacacctctttgtacacggggcgatataggagtctagaagactggcgtgtacctacatgcttagcgttaagcatagccatgtagactatatcacttccaaattcaaattctgtctatatggcaactaatttgaaggaggataaagtggtgatgggatttagcatagcattaataattattgttcttatcgtattgtattcgttagctaggacggcaggtgagtcggaccggatattagaaaatataagagagcaatcactccttggaagggaggagagctctggtgggaacagttgaaaaaagagataagcataagaaacgcaggtttatatctccagaagagaagcttgagagagaattaaaagattgtatgcattgtagattcttctggggacataacaacagatgtgccaatggaacatgttgtaaaccatctaagaaaaaagaacagaaacttccgacggaatgtgtcggatgtccatattatcaagggaatggttattgttttccttgtatgcgaaagctgataggaaagtaggtggtttagatgttcaagtggctatttaagaagaaaggatgtgcaaaacacatgaataataagttagaagtaatcggcattgatcatggatggtcaatgatgaaaacaatctctcaggtatttgtcacaggcgttaaggagattacaactactccggcacttttcggtgatgtacttgagtatgaaggaaagttttacaaggtcggaactgtaaggcaggaagtaaaggatacaaaggtcgaagatgacagcttttatcttctcactcttgcagcagttgctaaggaacttaaaagaagaggtcttgcagaggcaaaggtattccttgcagtaggacttccacttacaaggtttggagcagagaagaatgattttatcaagtacctgacaaagaataagcgtgtaagcttcaaatatgagaatgagtcatatcatattgaaattgatgatgtggcagtatttcctcagtgctatgcagcagtagtggacaagattcctgctatggcaaagaaaacactgatagtagatattggaagctggacaatcgacattatgccggtaatcaacaagtcaccggatgaatcaaagtgtgtgacgattccaaaaggtcttattacctgtatgcgttctatcaatgagcagtgtgtaagacagcttaacggagaggtagacgagtcagagatacagaacatcatgcgatatggcaggtcagatattgatgatgaatactttgccataatcaaggcagagatagaggattttgttgataaggtatataactcaatccgtgagtttgggtataacttaaagactacaccgattgtatttgtcggtggcggggcagttgtgatgaaaaactttgggagccacgatgccaagaacatttcctataaccttgatgtaaaggcaaatgcaagaggatatgagcagcttgccacaatgggacttaaaagcactaagcgattatcataaggaggcagatgatgggaagaagacttgaatatgaagtaaaaacttctgtccgccttaacatgagcaatcctcagcatgtgaaaatcaatgatgtgattcagaaccttgatccgaagattttcaaatctaagaaccagttcatcatagatgcgattcagttttacattgataattatggaaaagaaacctttgttatcaagaagaaggaaaaagagagggctgaatatatccggtcagaagatattgatgacattaaggaagaagtcattgaagcagcaaccaatgaggctaggaaagaggtcataaggctgttaggcggagtgatatccgggatgaatgttggtcagccggtaataatgcaggcagccaatagtgaagcacaagaacctacagaagatgttatggacgatgcagatgttgcaggacttgcaatgggatggatgtcgaaaggagactgattattatgagaagagttatgggagccgtaggaacagtgattttagagatactcaagtggatattaaggataattcttggagctttgaagctggtcttaggacttgccagaataattcttcttctattcgctatggtggcaagggtatttctttcattcgtaagaatgggcacattctgagaggaggtgagcatatatgcaggcaaagggtttattcttgaattataagaaaaacagacgacttatgcagtatttctttaaaatgagagagctgatataatgaaaggagtttaagatgcacagaatacgggacagtcctatgtgtcccgtgcattacagataaatagtttaccgcaagggtggatggcacggaacacaaagcctgtccctcttgcggagaagggatgggtgatgactatgaagaagataagtattatcttattatccgcagtattggtcttttcaatggctgcctgtaatggtggtaaggaaaaggctgataatcagacagagaaacagacggaaagcgtaaagccaactgaagaagtagcaatggcaacggaagctgtcacagaggtcacaaccgaagctggaagtgaagagacagagaaagatattgccaatgttaaagattcagaagagaagacagataaggaagataaccagtctgctgataatgaaactgcttcaaagcagaaagaaaagtcagagcaggatgacgagccggaacagaaagctcctgcaagtggtaataaggaagctggtggaaatcagagtaatgcaggtaatggtggtcagactacagacagtccgaaagacaatgtgagcaatccacagcctgcatccgtggcgtacagtccacagaatgttgtgtcacttgcaacagcaaagtgtcaggcaggagggatgattaccacacagcagaatttacagaatcatttgaatgacggcagtatcacgcaggaagagtacaatgagtattatccttacgatggtatggaaggctcttattatagtgtgtttgtagagacagacctcaacaaagcaagtaccattgatggacagcggttatcatctgaggatgcaatcgcagaatatattgccagtatgttacttttggaaacagatccggtattctacatcagttatgatggagtttacacgacaggcggcacagactattacgagtttcgatgtcacagataaataaaaacgaatagaagcagaaggaagaaagatgtaagccataaacttatatctttctttttttatgcgtaaattaaggaggaaagagcacatgaaacagaaactaaagcgttttatggcaggatttatggctatgctcacactggttggaacactctttacgaatggaacaacagcatttgcagccagtccgcaggcaaatattgcgttctggaatgcgtcagtcaaaaattccggagaagtaagtgagctgaagcccggatataatcatggcaagatcctgtattcaattcttgacggaaattctgcatattgtatgaatttcggattaagagcagatggcggtcagcttatgaacagctacgatgatgcgagcacatcaatgtcagcacagcagagaaagcttttgagttactgcctttattatgggtttaacagtacacaaaaggcggctccaagcaacagccagtgcgatgagtatatcgcaactcaggcaatggtatgggtaattgtagcagatatctttggaactggaagtggtgattcggcagcgagaaagctctgcaacacagcaccaagtcctgattcttcatacagctattatgagagactcagggacaatatcagcagctcctacaatgcaacacttccaagttttgcatcacgcagaaccagtgaggcaccaacttatgaattaaagtggaatgagggaagtcagagatttgaaacaacattatctgacagcaatggtgtcttatcagactttgattttggcatcagtggatattctgttgataagaatggcaacagtattacaatctcttcaacgagcgtgaataccacagctacaactggaacattcacatccaatgctggcaaggttgagacaacatcaagctgtgtattctggcttacaggaaagagcggatatcaggagtttatttctgaaagaccgacagcagatcctgtcaaagcctatatcaaggtcaagacagagaacatcggatatggtgagcttacaaagacagatgagtcaagcggagtgaagctttccggtgcagtctatggaatttattctgacagcggatgcacaaacagagtacagaccatgacaacagatggaaacggatatgcaaagtcagctgcacttgtcgcaggcacttattatgtaaaagagattacagcaccaaagggctatgttctttccggtaaggttcatactcttactgtaagagcgggacagacaaccggaatctctgcaacagataaggagcagcttggagcaatcacaatctacaaggaaggtgaagtgctcagctcatggaatggaagtaactttatttatgagaaaaagaagcttccgggagcaacatttaaggtgacagcaggagcagatatctacaaggcagatggtacaaaggtgtatagtgctggcgatgttgtagcagaaagccttacaacaggagctgacggacaggtggtattatctgaccttcatcttggaacctatgtggttactgagattaagagcattgatggttatacaatcaataccacacctcagacagtagcagttgagtataaggaccaaactgtgacagtacagtatgaatcaactacgattgagaatacaagacagaaagccgatgtatctgtcgtaaagaaggactctgacacagagaatcctcttgatggtggcaagtacacactttatgccggaaatgacatcaaaaactatgccggacaggttattgtgacaaagggtacagctcttgagacagtaactacaggtgaggacggaaaggcaagctacagcgtggatctgccaatctctaacggatattatatctcagagacacaggcaccatacgcttatatcagaaaccagtctgatgtgtatagtttcaacttcaatgtattgcctgaaacacaggcaaaggcaacattcagccacacatttaagaatgacagaaccacagcaaagattcatatttacaaggtagataaggaatcgggcaaagcagttccacagggagatgcaagccttgaaggagctgtctatggtctttatgccagaaacaatatccagcatccggacggagcaacgggtgttgtatttaaagcaggggacttagttacaactcttacaacagataagaatggcgaggcagaggtcaataacctttatcttggcaactattatgtgaaagaaatcacaccatcagaaggctatcttttagatgaagaggagcatgatgtagtatgcgactacgagggagacttagtagcagaggtatcaagaagtacaacttccgcagagcaggttatcaagcagccattccagcttatcaaggtatcggacaatggcgatgataccgaagcaggacttcttgcaggagcagagtttacagcttatttaaaatcatctttacctgtaaaggaagatggaagctatgactttgataaggcaacacctgtaataatcggagaaaacggtgcaacaacaatcacatccgatgacaagggacatgcagtttccatcgcaattccttatggaacctatgtggtaattgagtcaaagactcctcacaatatgaaaactataaagccatttgaggtaaagattaaggagaaccatccaacagagcctcagacatggagagttttcttagacagggagtttacagcaaagcttcgtgtaatcaagaaggattctgatacaaagcagacagtacttgtaccaaatgctgagtttaagattttcaatcttgataagaacgaatatgtaacccagtacacgacttatccgtcaaaggttaagcatacttcattctttacggatgaggatggcgatttaatcttaccagaagcacttaaaatcggaaactaccgcattgaagagataaaagcaccattcggatatgtggtaaacgataactatatcaacatttcggttgatacagacacagcatttgagactgatggagataccaatgatgccatcatcacagtggaatattctgatgccccggcagtaggagagcttactgttgaaaagaagggagaggtacttgacggatttaagggcggactttttgcaaactctgaggataaggagtttgtctataaagagggttcacttgcaggagcagtattcaaggtgtatgcagcggaagatattttcacagcagacaaccagaaagacgcagatggcaaccgtacaaagtattacagcaagggcgaccttgtggcaactcttacaacaggaaaagatggaaaggcagtagcaaagaaccttcctcttggacagtataaggttgtagaagtaactgctcctgacggatatgtattaaatccgaatgagcagacagtcacattcacttatgtggatgataagacacctgttatcaaagaaagccttactttctcagatgacagacagaaacttgatatgtcagttacaaagcttgattcagaggacaacacaccgattgcaggtgcagtgttcggacttttcgcagatgaggatatcaagaatgtggatggcaaggtaatcatcgaaaagggtacactccttgagaaagcaacttctgatgaaaacggaaagattgcttttgttaaggattatccgtttgcaaagtatgttgcaaaagagattgaaaagcctgccggatatgtgacaaacgaagaggtagtaacctttgataccaagtatcagggacaggatgtgaaaactgctgtatatagcagcgagtataaaaatactccgacaacctttgaatttacaaagacggatattacaagtggcgcagagcttagtggtgcaacacttactgtacttgataaggatggaaatgtggtagacacttggacatctgatgcaaaggaagctcatgtaatcaagaagcttgtagttggcgagacttacacacttcgtgaggagtttgctccatacggatacctgaaagcaaccgatattcagtttacagtagaggatacaggcgatgtgcagcatgtcgagatgaaggacgaggttccgacaggttctatcgtgatcaacaaggatggtgagtttgtaacagataccactcttatgaagggacactggtatgatttcattttcaattacttcaaggatagtctcgcaggagtaacctttgatgtatatgcaaaagaggatattgtgagtgcagacggacttggaactgtataccacaaagctggtgacaaggtagcaaccattgttacgaacgataagggcattgcaagaattgatgaccttccacttggcaagtattatcttgtagagacaaagacattagatggatttgtgctggatgatacaccgattgatgcagacctttcttatatcgaccagaatacaaaggttgtatttgcgggaatggatgtaaccaatgagagacagaaggtgcagattactgttacaaagactgattcagagacaaagaaagagcttgaaggtgctgtatttggtttgtttgcgaaagaagatatcgtaaataaggatggaaaggttattgtcaaagcagatacacagattgagagaggtgttactggaaaggatggcaaagtaacatttacttctgaccttccacttggacagtattatgtcaaagaacttgaggcaccaaagggctatgtgaagtcagataagacatttgatgtggatgcttcatatcagggagataaggtaaaggttatcgagtttgaggcagcatttgaaaatgcaccgatcaaggtagaaatttcaaagactgatatcacaggcaagaaagaattgcctggagcaaagctttcagttattgatgctgatggaaagcttgttgagagctggacatcagaggcaggaaagactcatatgattgagagacttcctgtcggaaagtacacactcagagaggaatctgcaccatatggatataaggtggcaagtgatgtaacctttgaagtaaaggagacagcagaaatccagaaggtatccatgaaggatgagcaggcagtcggtaagattttcattgagaaaactgacaaagtaaccggaaagccgatcgagggtgttgtatttgaagtaagggataaggacggaaaggtgcttgatacactcactactgacaagaatggtcatgcagagagcaaggagcttcctatctgtacttacaatgaggatggttcatttaaggaagatatccattatacagtagttgagacaaaagcagctgacggatatatccttgatgaaacagctcacgatgtaactcttcgatatgatgacaatgcaccggatgttgttgtaacaacacttaagcttgtcaatgtaccgacagagcctaagcttccacagacaggcgacaatgcaaatccgcttctttatcttggaatcggtgcacttgcacttattactggtgtcggagtaggacttcgtggaagaaagaaaaagaataaacagtaacaattaaccttgcggggaatgtaagccagtgacttatgttccctgcttttttagattaaggaggaaccgtaatatgatgaattacgagatttttaaggaagtagtaaaagaaaagtttatggattatatgccagagaagttcaaaggaatggagcttgtggcagaacccgtggaaaaggtgaatgtgactcttgatggcatcatcttaagagaagaaggcaggaacatttcgcctacgatttatatcaatgacatgtataagaagtatcaggactgtggtgatcttgaggaaacacttatggctgcatgtgactttatggaaagggcatatgagcaggttccggttgttgatgtggacagcattatgaaggatgctaacgagaagattgtattccagctcatcaatacagagcagaataagacatttttggaacaggtgccgcacagggagttccaggatctttctattgtgtataaggtaataatcagtgcagataaggatgcggtgcagagttcaaaaattacaaatgaatttgcaaaaagacttggaatgagcgaggaacagctctttaagtgtgcagcggaaaacacaagaagactcttcccacctgtcgttcgtagcatgaatgacattatgaaagaaatgttcgcaagggatgggatgccacaggagatcgcagagatgatgatagctgagattccaccggagcagacgatgtgggtgatttccaatgaaaagggtatcaatggtgcagcatccatgctttatgagaatgagcttcatgagctggcagagagtttagagagtgacctttatattctcccttcgagcgtgcatgaggttattgcagtatcttcagatatgggaagccctgagatgcttgcacagatggtagtcgaggtaaatatgcaggaggtgtctttggacgagagactttccaatcaggtatatcactatgataaggatttaagaaaactcaccctggcaactgatacaccgaacaagaggcttgatggtatcgttgcagaacctccccttgtatatgatgcgaaggaaaagtccagataggaggcagttatggagcaggaacttacaatggaagaactcattgctctcataaacagccagaaaggtgactttgttatccgtgtcgagtttggagaggaggcggtgtctgatgccaaagaagaatgacttcaagctcgatgtggtttcggtaagacttgtaaaggatgctccgatttattcggagcacacctttaacaatccggcggatatagctgctgtcatgggagactgtatgtgccagtttgacagggaagtagtgtgtgtggtcaatctaaggtcagatttgaaacctatcaatgtgcattttgcaagtgtcggctctttaaatgaggcaatggcacatccgagagaactgtttaaatcaagtatcttaagcaatgctgcaagcatgatgttaatccattgtcatccatccgggaacgtattcccaagcaaggcagacacgatgatgacggaccgcatgaacaagctgtgtgagttgatgggaataccgctcattgaccatatcatagtcggtggagacaatcgtgaatttttcagtttcagggaaaaaggcatgattgataatcctaagattacacttagcactgattatcggacacttgatatcaagtcaccacttgtagcagagcagggaaaggcaaggtgagagcatggatggaagatttacggatgaagagcttgccatagcaaagagtgttgacctgtgtgcagtcgcagaaagtcttggttatacagtaaagaggattggaaaatatcacactttaaaggagatggattccatccgtatctataacaggagtcattggtacaggtggtcaaggcagtttgacaaaggcaacaatggcggctcacagatagatttcttacgggtgttctgcggaatgagtgtaaaagaggctgttttctggcttttagattttgcaggatacagaagaatcgagaatcctgtaaagcagccacttgttcatcaggtatcgcagaagcaggcagaggagagaaagccatttgtcctaccggaaccggcaggagataattcctatcttatttcctatctgaatcaggagagaggaatcagcagagcagtcatagatctgtttttaaaagaaggactgatttatgagagcagacattaccacaatgttgttttcaaaggaaatgataaaaatggagtgacaagatttgcaagtatgcggggagtgtttgataagcagggcaagcaattcaagtgtgatgtcacaggaaatgataagaactatggatttaatgtggtgaatgaaaacagtacagagcttgtagtatttgaggctgcaatcgaccttatgagttatgtggatatcttcacggattatgaatcaaataagctggcacttgggatgcttgcagatgcaccacttgagacttttcttcgggaacatccgcagataacttccatccggttctgccttgatggagatgagccggggagaaaagcagcagctgaacttatgagaaagtattatgagcttggatatgaggtagaagactgcccgcctccagctggatataaagattacaacgagtggcttgtggcggcaaagcttaatctgaatcagatgaatcagagagcagatgaaccagtcagggcatgaaatatgccttatgtaaagagtggtggcagaaagtgccgtcaaaatagcaaaatgatggcaaaatccgccatcagaataggaaagtgatggcagaaaacgccaccaaaaaattctgtcgtaaaattatatatttttggatgtgaaaaagtggtggcagaaaacgccaccaaaatagcaaaatgatggcaaaaaacgccatcaaattataaaaatggtggcaaaaagcgccaccatagtataaaacagagggttttagggagattttctccctaactagatggcattaggacagagatgtctctaatgcgtatctagccgtaaacctaagagatttagacagggttattgcccagctgggtaataaagaactggaaaaagctgctgtaacagtagcagaaggagtaagagaatacagtacgggtaagagaggaaggtgattctatggcggataaagttcattgtataaggaaaacactaagacttatgccacaggaagcgaaggtactttctgataaggcaaaggcaaatggaatgaatgaagccgaatatatcaggcttctaatcagtcagaaaccaaatgattatccggaagtaaggaaacttcttaaagagcttatcaatgagataaaccgaatcggcattaacatcaatcagattgtatttaacagtaatgctcagatatattcaaagaaagataaggaacagcttgtggcatatatgaaaaagctgaatcagtctgtcagcgaggcggtggtaaagattggcaatcagtaagatacttcacatgaaggacagcgggaattcttttcatgcaaggcatttaaagcgggcactggattatgtaatgaatcctgagaaaacgcagggaggaagacttgtgggagccataaactgccaggcagatatggcttttgaacagatgatggatacaaagaagcagtttggaaaaacagacaagcgacaggggtatcatatcattctttctttcaaagaggatgaggtggaaccggacagggcttttgagataacacagaagtttgtagcagaatatcttggtgatgcctatgaagcggtatttgtggttcatgataatacagaccatgttcattcacacattatatttaacagtgtaagctttgtggatgggaaaaagtatcgctacgagaaaggtgactgggcaaagtatatccagccgattaccaataagctgtgtcaggagtatggtctttccattatagatgtggaggatggcagcaaagagaaacagcacgagaattataaggattggagcgaatatcgtgaaggcaggattgttgagaatggtaagcgaggcaaggcaacatggctctatattgatgagttccatgtcctgcttaattcggagtattctgcaaaatatctgcagcagctctggaagaaggtaagaaagcagggaggtctttgtaccggtatcacgcagaatgttgtcgatctgttgcagaattacacagcaaccacaatgcttgcaaactctgagtttgtggcactcttgaagcaggcaaatacagacagttcaaagatggcggaggttatcggggtatcagaggcacagcttcggttcgtaactaataccgcctctggaatgggacttattaagtgtggttcggtagtaattccctttgataatcagatcagcaaggatacggatttgtacaggctgtataataccaacattcatgagaagattgcggaacagaagaaaaaagaagcaatgctgcagtgataacagatgaatttttatagaatctatagtataatcaagaggtcggatgaatgtccgaccttgatgataataaattagatattccctatttttaagaagaaagcatataagattcgatatgaaaaataaataaggaagcagttctaaaatgtatcatttgtaccggagaacatgtggctggattttaagatatgcttatcgtacactttgacgagaatatgttgattggggatgcagcggacctggatgcatttatggaaatgtatggtgtggaagcaatttccaaggaatatttgtaattattagggaaaagaaaatttgaattttacgcactattaacttttggatataaagtgccgatattacagatatagaaacggatttctgtatcaattttcaaggaggatgataccatgattagagcagctaatttaacacaggtaacagattattataagagcaatactgttagtaagcaaaataacacagagaaagcaaaagatgtgcagcccaatgcacagaaaataaaatccagcgaagataagttatcttctaaggcacagaaatatctggaaacattgcgtaaggataatgcggatttcgattttattattgctgataaaggcgatgatttcagaggattagtagaccaaagcgataaggaatttacagttgttttttcaagtgctgaacttgaaagaatggcatccgatgagaaatatgcacgggaaaaattgtctacggtaaaaactgcagttgagatgtcagataaaatcaatgaacagtttgggtttgaacgtgcttggggaacgacagacaatagtggaactgtattaaataagttaactatgtcctttgatgatgatggaaagatgacactttttgctgatttggagaagattacagaaaagcagaaagaacggcttgaagaattaaaggaaaaacgtgcagaggagaaaaagcaggaaaagaaggatgtaactgttaagcggactacaattcaggcaaattcaaaagaagaattacttgaaaagatttctgaactggattggagtaagataacagaagaaaaggcaacacagggtatgaagtttgatatcactatttaatcgtagcattaaccgggaattggaggtgtgctatgattgcaggtacaatacgaaacgctgtgaatcagatgcagttagtaaatgattgggagcaaaagaaggctaccggggatgttgtaaagaagcaagagggtatgactgtaacaagtcaggaagaaagcatgattcagcatttccgagagcaacttgagcgagacaaagaaagttctgcatatagtcagatttataacaagattgcaagcggtcaagaattaacagcttcagaagaagatgctattcgtcagaaagaccctaaagcctatatggaatataaagcggcaagaatggaacaagaagcttatgagcgtaggttggagagatgtaagacaaaagaagaggctcaaaggcttcaagtaaatgagatgaatggaaatttggcagaactaaaaagtatcgtgaataatccaaatattccaaagagtgaaaagcttaaggaagctcaacgtatcatgggaaatacttttagagctgtagagtcattcacaagatttgtaaaaagtacagaatatagggatttgccaacagaagaggaaattgtagagacatctatagaaaaggggcaggttgcagaggattcaaacgatactgaaatgtctgaacagttaacatcagatacaactgtttcagtagatgaggcagcaaaaatagtaaatgattcgaagcgagatttacaattaagtgatgttcaccaaattgaaaaagatgttatagaggaaatgaaggatatcgaaataaagcattttggtgagaagaaatcatcggtcagaatagacattacggtataggaatagtctgcgtgaaatttcagtttcatgttgcttttaataattgaatattgaatgattttacatagccgttaaggagtaatttttgctccctagcggcttattttatttttcaaagtaggaggtgagaaaattgaaaattagaaaggttgatgacaaaccgatggtcattcacaccaaggagaaagccaagattcatgcccacgaaccgaagggagccaagattaaggggagtaacatctatacagtagagagaggtcctaagacagctggtgcaatgcttgcaagggaaaagcagaacatgatcaaggagaagttcaaggagtggctgtttgcagagccggagcgaagacagaagtatgtggagtattacaacgagacatggttgatttcgaaacattcagcaagtcagatttccgagctgtaaaggtaaaagaatgtgaagcagttccaaaatctaagaaacttctgaagttcgtattagatgacggaagtggcgtagatcgtgtgattttaagcggaattcacgattactatgagccagaattcttagtaggaaagacattacttgcaatcacaaatcttcctccacgtaagatgatgggaattgattcttgcggtatgattatctccgctacacaccttgtagaaggaagagaaggactcaatgttctgattctggatgataagattccggcaggagcgaagttgtactaagaaagtaagaaatcttcacaatttgacaacaaaaattctttttgacaacaatttgacaacaaatttgtattcaaacatgaatcatcatgaagaatggtgattagttgtcagtaatactactccaacaatatgaattgttgagggcactttttgaaagaaaaatctttcagagagtgccctttttttattcattaacaatgtttgttgtggtcgaataaaaggtgaaaggggaaacagatttgaaaacagaaaatatgtattataaccagcagaagcgttcagaggtaaaagaagaagcacgcagacttagaagaaaatttcttcgttatcaacaagctgaaattgtatatagtttgtcacataaaaattgatggaactagcaaatgatgcaggagcgatttacagaatggatggaattgttttgataaacagagaaatctttgatgagtatcttgagcaatttcatgaaaaataaaggaacgttagttcgaagaaaaggggattcgagatgcatggaaaagtttggatgttttctcatcttattgatgatgaagatatggatatcaggccattattgccgggggagaatgcaattgctttatggaaacgcatgaaagagtcctgtgaagtcagtgatgtgattgtattgaatcagaatggggaaattcattgctattatgtcaatgaagactatccacagcttttatcagggttcatccgattaaacccgtcaggtacattggtcacgttggatacggaaaattaccgcattagtggcaagccgggaaactggatggctacggatgatatcattattgatggaaaacagttttatctcatggagcatcaggaatatcacagacaggttgcctatatcatcctagatagttatgggaagatgatcatggaggaatgtcagaatggcttcgatgaaaaaaccaaacagaaactccatgagctcatgaaggtaccggaacaaaggaaacaagaacatcaaaaatataaaaacaggttggaacattatcagaaattttttgagaatgggacttatgagagaagctgggaatccggaatagaaggaaattataatatggtagatggtcaggtaaataatctgaaaaatgcagaagagaaaaggatagaaagaaagtcagcacagaggccaaaacaattaacaaagaagaaaccaaagaaaaaagagtcggtaatcaagagattgcgggaaaaacagatcgcaatcgctgtgagatcagggaagccggtaccgagatatttggagcaggatatggaaaggaggagaggatagatgctatgaaactgtcaaagtatgaaaaagaaacgattatcctgacaaatgaagaagatcaatattatagtgtctatacatttaatcagggattacagaaacgactaaagaattttgcagagagatatccggaatgctgctatctaagcaactcaacaaaagaaggaagtgaacggaatcttgacgtgcagccggattaggtgttttatataagtgtcattgcctgtatcttgtgctttcctatgcggattttttcggggacaacacttccgtttgaagttatgcccgttgctatgcagaagataatcagtatttttcctatgacacaaggtattcagttaatgaaagtaacatttcttggattgccaaccgaaaatgtcctgctgtctgttgttgttatgggagctgtcatattaatatgttttggaatttctgtaaaatgcttcaagtgggaataaatagttaaaagaataaaattaatttaaaatctgctggatgacggtaaaagaaaaaagccgtcgtccagcagatatattttcacgcatctatcataaattcgattttgttttcaatagatcttttttcatagagaatctccgtaataaaattgcaaacgacggagtaaaattctttttgtgttgtataaaatctggtgccactcaatagattgcattgaggtgaataaaattagtggttacattttggctacaaaaacattacggacgaagcggattatgtggataagcaatcataaaacacacataaaacgaattaataatacactttataagcgtttgtatgaatgtaaaagacgaaattaacaggttgtttctttttcaatcaatgaagctggtaccatgctttcgtatggtatatagttttccagtgactgaattgcaatctgcgccataagggaaatattctggtcgatagaggtaatgggatgaacggcatagttggatgcaggtgagttgtcgtatccaatcaattcaatggtgttgggaatatcaatattatttttgaggcactgacgttcaaaaagacttgcaatatcgtcatttgagcagaaaactcctatttttttaccggtgtattttgtggtaatatgctgaaccagtttattcatggcttctgtagctttgggcaggtatggatctgtgagatcattttcaataaaccgttcataacaaagatcttttacctcatattcaaatcccaggattcgtttaaaggatggccagtcttctcgaaaatcattattaatatgaatgaaaacttcacagttgttacgtatcaaaagatttgcggcaagtttgccaccagtaaagttatcattgttaatttgcttaaaattaccgccgacacgttcaatggagataaccgggactggcaggttttcaatgtcctgagcggaaagaagatgactcaaaagaatcagtcctttgattcggtaggaaattagattttgaataagctgtaattcttcttctctggaatcattggaagtataaacgattagattatagcctttttctttgccgtattttattagttgattgagtaattctgtatagaagcttaaatgtaggtgggggaaaataaccccaaccagattggattctccggttaccagaatgcgggccagattgtcctgctggtaattcaattctttaattgctgttttgattttatcctgtgttgtctgcgatatgagctcaggatggttgaagtaacgggaaacggtagtcatggaaacaccgctccgttcggcaatatctgtaattttgactttactcataaaagaacctcacttatttggtaaatatagtcttgtgttatatgcgatatgagacaaaatatatctcactttatgaatttgattatatcataagattaggaaaaatggaagaataaatgaaaataatttcatgaaaaaattttcatataagttttattgataaaaagaaataccataaaaataaagaaataagctatgaaatatacacaaattaaacaaaaaaatattgtgaatagtgctgaatagtgaaaaaatacatgaaaacgattgacattataaatttcatgacatacaatcaaatcatcagctagaaagtaacgaagagaaattaaaaaagaaaacagttggataaggggcttgataatcttaccggagaggacatcagagggatgcttcgatttgcaaatgcaggcgcagctctgattacaacaaagcgaggtgctttgagggttatgccggaaaaagaagaaattgaagcgttattagaagaacagacggagtaaacatataggaggatttattgatgtcaagtaaaaattattatgacgttacaaaatggaacgttggaaatccttacgaggatattggggaagtaatcaacagtattattgcggatattaaaaagcgacaaacagattcaaatatgaatgaaggtggaaaaccgggagcagtcatttacattccgtctggtgattatcatcttcgtacacaagtagtgattgatatcagttacttgaaaattatgggttcaggacatggttttgtatcatccagtatccgttataatcttccggagaatgaatgggcagatttacatgaagtgtggccgggcggaagccgtatccttgttgacctttctccaaagccaggagatgaagaatcggcaggagcagcattctatgttgagcgagatggaaatccacgaattagttctgtagaatttgaaaacttctgtattgatggtttgcattttgtggacgatggctcgggaatgccaaatccagaaaatacatataccaatggaaaaacaggtatttatattggaagtgcacaggattcattcaggctcacaggtatgggaatcgtatatttagaacatggggttacgatttatcatgcagatgcgttgtctattcatgataatttcatagcggaatgtggtaattgcatagagttgagaggctggggacaggcatctaaaataacagataatctgatgggcgcaggttataagggatattccatctttgcggaaaattttggtggacttttgattacagcaaataatattttccctcgaggcacaagcagtgttcatttccgtaatgtggcacgttccattattacagccaaccgatttcattccttctatccgggaatgctggtatttgaaggaaactgttcggaaaatatggtttcttcaaatcattttttacgtgacaatgaaccatgggcgcctatgttggaatatgataatggattagatgatttgtacggtattctgtgtatcagtggtaataataattcggtaattgccaaccatatttcggaaataatccatacacagtctatcaagccggccggggcaaaacctgtaatcatacatattgtttcaggtaaaggaaattatatttcggataaccatattgttgcaactaccgaagctacggatgagcagacaaaggcatcagattcttgcttttctgcacaagtagatgcactgacgactactgataagttggttgcgcttgatgtaacagctgttttggtagaaaaagaatccgttcaaaatacgattcttgactccggaagcgagggacaggttattatagacaggactgtaaatgcttttagagccactccagtgccaggagtataaaattatggtgcaaataacaagtatatgaaagaaaaagagccttggcgtgatgtcagggctctttttagtggaatgaggttgagattatggaattttatcaaaaacatgagaatacttcggatatacatggaatttttatatgtttgaaaatccagggcaattcaaaatttcagattgtctgtcattattttatacctcatttttctgtttatcatatgttttgttaccggccactctcaagcgtgaacagtaaaattttttgtatatgtatataatacgtgtttttgctgatataatcaataatcccccaaataccaaaatcagccacaaaagcattttactgcttttacgactgatttacattgaaaactgacaaaaacctcctttttgctttaatgataaacttaaagcgcaaaggaggtcaatgttcatttatgaatacttacaattaattattaaagaacgataatgcttccttcaatccatcagactcattattcatgtgttctgccatttctgaaactccgtgcatcatcgcattgagctcctcgatattggcattcatctcttcggttgctgcggcatttgctgcgctgacgtctgtcaggctgttgctgctcttcgtgatgtcatcgttcagctcaatcatcgcagtgacaagctcttcgatttcatcagctttttctgctgtcttttgaatctgctcatcaagtgagccaaattcatcgagtactgccttaatctcttccttctgcttggcattatcctcgacgatggtgccggatgcctgaacacaatacctgcactcttcaaccagtgatgatattatctgcttgatattctcaagctccgtattggtattgtctgaaagcactcgaatctcctgtgccaccactgcgaagccctttcctgcatctccggctctggctgcctctatagatgcattgagtgacaaaagattggtttcactggatatttcctcaatgacagagacaatattgctcaccttgtcaaccgtagtatttacagtttctatgcgttttgaaattgctgagataccctcatccatcttgtggctgctatcctgcatggatttaatcttgtcattcatgattttactgctatcctgcactgctaccgtctggtttttgatttcatcaacagaggcattaatgtcctttgtttcattgctcatctccagaagattttcattaatcttggaaatagatgctgccatgcctgtagagccctctgcaacatcctcgactgccttggatatctcgttatttgcagcaagtgtctgactgcttgtgtcattgagctcatagctgtttgatgacatcgtatcactggaatttcttatctttccgactatacttccaagcgattgtgtgagctccttcatcttttctataatcaggcctatctcatcatttgactccttgaccacactgaaatctgcctcaatattaccattggcaacatcctcaattattgtactgacctttacaagcggtctcataagcctgcgtcccattatgaatgagataataattgcaataagcacaacaatagcaatgattccaacggcaactcctgttacagtagtgattcctgcaagtgcctcagattcatctgctgtaagcacaagtatattttcattgttcaaaatcgtatatgccgaatactttgttgttccattgaaatcatattctacaacagtcgtgcccggttttttgccatcctgaagctgttgtacaactcctttaattacggcattctcaacaggctgtccaaccttttcctttgttggatgataaagcattgtgccatcattctttaccacatagacatatgagctgtccataccttcgagctttacatcggaaagactcttagcgtattcatcatagtctaaatcctctgtatctgcattgctgatctcattctccacaatttttgatgttgtattgataacatctaccatggtatgctttgtgctgtctgtaatttgttttttggagctttcaagaataaataccatacaaattacatttgaaactataacagctaaaatcaccattactatgattttggctgcaaatgtacccctttttttagttttactctgttccatatgaccatctctcctatcctactgctactgctactcctttagcttaaaattataagacaatattaccatttttggtgaaattatacaatagtttatcagtaaataaaaaatttaccaaaaatgaatttctaaattccaccgcccaatggggtgatggaattcactctcgcacagtagatatttactctttcatataatcatgttatgtttatgactccttctgacagcagtagaaggagaatcattatgagtaaatatataccaggaaaccagaagcaccttactttaaatgatcggatctatattgaaaatgaactggcaaaagggactacatttaaagacattgcagcatttttatgtaaagatccaacaactatatctaaagaagtccgtgctcatcgactttcagattggtatcacaaaggtactttttataacgcaaagaacttttgcattcatcgttaccattgtcaaaagaccaatgcctgtggaaaaatccttctctgtggcattaaatgtgcctcatgtcctacatgtaatcagacctgcaaggactttgaaaaagaacgatgtaaacgattggacaaagcgccatatgtttgcaatggctgcgcgaaaaagataaatcactgcacgattgcacataaatactattacaacagccgtgctgctgacagaaaatatcgtgaactgctgatatcttctcgttctagaataaatatgaccaagcaccagctccatcagaaagaccagattatatctccattgattgagcaggggcaatccccttatcaaatccttacaaatcacccggaactggatatgtctgtccgctctatgtacacatacattgacaaaggactcttcacagcaagaaatattgatttaaaaagacaggcaaaattcaaaccgcgaaagtgtcataaaacacaaatcactgatcgttctgtttttgcacacagaacctactctgacttttgttcattagacctgtcgtcttttgtggaaatggatacagtccattcctcaagagaatcaaacaagactctcctgacactgttttttacgaaagaaaagctatttcttgcctttttacttaaccgatgtaccaaaggtgctgtaagacttacctttgaccgtttagagaagcgcctgggcacatatgaatttatatccgtttttgaaaatatattgactgatagaggttccgaattcggagatccggtaagccttgagacaggcattcagggaatccagagaagtagcatctactattgtgatccaatgcgcagcggacaaaaaggcgctatagaacaagcacacacaatgcttcgtatggttttaccgaaaggaacttcttttgaattcttaacacaatgggatgtgaatctcatcgtaaaccacatcaactccactccgcgagaaatcctcagtggaagaacaccatatgaagttgcattagaaacgcttggtgaagatatcttaaaagcatttcagcttaagccgattgaaccagataaggttaatctgacgcctaagctgatacgctttaaccattaataaaactaatcgaaatctgctgtcagactggatgtaaacttttcacatttttaagatgcggctggtggaatttagtctagcacaccgaattccagtagcctatttagcatgtctagaaatcgagaaaatttcgataagttacattaattatagcagaaaacgatagatttagtccaaaaatttcttgttaaaccagcaaaatttaaatcacgatggaatttactcttgcactggaatttactttttcaagtcagcaataaaaaatttatctacattttgcctttgattaatttgtcgcgcaaatagggttaatgttcaatcataaacagttatactacctattccacattctttagtgccatgtccatcgggattctctttattctactgaaatcaaatactgtcactatcaggtaaccgatgagcacaaacgcaaacatctttacatagccgacaggtgtcatatggaatgaaaaccatccgctgaaggtctgaagcattatgcgccatacaatatccattacttttgcaccaagcactacactgataatatctgatataaccaccacgatggatgttgagaccagataaagacttgcaatttctctgttgtcgtagcctaaaatcttggtcatagatatggctgtctcatttttctcgatgatgagcttcgtgagcagatatatcataacggctgatagcaatatgcaaagcacctggaagtactgcatgtatgagcccatggagtggtcgagctggtctgccattttggtgatgtcgcgtatcgtgattgttgtcgcgatattgctctcatcgatatcctttatctttgtatccgacaaaaatccgctgaatctgccatctgcaaaatcaaaggtatccgcaaaatgctctatcggcataaataccgcgatgctctgggatttatcgtaggttcccttcaccttgaatttgtacgtttttttctcgtactgtgcatcgagctttatggtatcgcccggttttataccatatttatctgcaaatgagtctgatatgtacacctcgttatccttaagcgaatccatgtccttaagctttacgtatgcactgtctgtttccactccgtagacagacacctcctcgtcaaactcatctgttctccttaagagcgatgtcatgtcaaatttctctgcgtcactgttgtcggtttcaagcacgtttccgtctgcatcgacataggatttgagtacgtactgatattttgcaaacatcatactgtctgtatttttcttgtaataatcaagtgtatccggcatgccgactgccatcgcgagcattaccatgatgaaaaatattcccacaaaaagtatcagatagtttgccacattctggaacatgattcgcagtctgaaacggctcatgaagctccagcgcggaagtcgcattgcttttttgcgctttgttttcttaaggtcatgacgcagaaactgaagcggtgtgtgctgcatcatgcgaattattacaataagatttacaatcaacatgataatcaccggagcaagcgttgtttttatgaatgcgcccggattccagattgtatggtatgtcggcaggctgtagctgttgtaatacatgcccacaaccacatccttgaataccgtatagcccagtatatttcctactactgctgccagaaatgtcacaatgacaggcattgaaaggtaatgcctaataagctctccctttgtgtagcccgacgcgcgaagcgtgcctatcgctgatgattcatttgctatcgtattgcttatggtcactgcaaaaatgaatgcgattatcacgataagaatgtctaaaagaactcctcccatggccttgtctgagcccatatcgtccgtagcaaaattgattgccggatttgagtagcgcggtgtgtagtcctccacctcattgcctgctgccataacctgtgagaccatcgcctcaagaaagtcatctgatttttccttctgctctatgtcgtcctccggctcatcctcgtatttccatgcatatgtatagtgaatgctcttgtccaggcggtcaaagccctcctttgtcaccattgccacgtcaaactttatcgcatcaaacatcatatcggtcttcttttcatgcagtgtggagtaattgacatatgcgataaagcccgataccttgaattcttttccgctgacctttatcgtgtcgccaaccttcatgcccacgttgtctgcatgcattctgtccacagcgatttcgttctcattttgtggaaaagaaccctttatgagacatgcaaggttgatatccccggtctttgtgtatacacggatggttccgtcctttttgccgtctgcgtcgtagtcctcatcctcattgcgatagaaattctcgtagagcgtgacaggagttttgctgctatcgctgtcttttttgtcaggagctgtttttacctcgcctgactcgatagccgtaacaagctcgctgtcagccttatccttaagctcaaaatgtccatcctcctgcttgtatttacttaccccctcatccgcagaggtgagcatactgtcgtttgccacatacattccggatacaaagcctattgtcagcacgaggaaaagaaatacaactagatatttcttccagtcaccgataatttcctttggtatacgctttatcagaggattttttatctttttcctgctcataggtcaaatcctccttaccactcaagctcttcggccgaaaccttatttgtattgatatcgttgtggcgcacggctccatccctaagctttatcacgtggtctgccatgtttttgatggcctcattgtgtgtgaccatgattatggtgtttccgtactttttgttgacatcctctatgagcttcaaaatctccttggaggtgttgtaatcaagcgctcctgtaggctcatcgcagagcagtatatcaggatttttcacgattgcacgcccgattgacacacgctgctgctgtccaccggatagctgatttggaagcttatagcggtgctcgtaaagccccagcgtgtgaagcagctcatcgatatccagtgcgttgtcagacagataagcgcccacctcgatattttcctttacattcaggttcgcaatcagattgtacatctgaaacacatatcccaggtgctttctgcggtactgcgtgagctttttctcgctcatatccttcagcttgtcaccatttatgctgatatatccggaatcggcgctgtcgatgcctccgatgatattgagcagtgtagactttccggagcctgacggtccgagcagcacacagaattcaccctttgccactgaaaaattcatgcctcgaagcacctcctggcgcgtctcgccgcttccgaagccctttttcaaatccactatttctaagaactttctctcttcttctgacatatgatatcctctctttcaacatttcaaattacatttaccttatataatgttatacgtttaaaaacaattattggtaagattgtgcttactgtagttacctgtcatttatatatgttagtgttatctaacttcatgtaataagagtaacgctattctgcctttcttgtcaataaaaattttataatcagcttggtaaaacatctttttattttctgaccggattaacagcttcgaggcgtatgcataatataaattaaatctgattttacggagatatgaatttttatgtgtggtattgccggattctgtaactttaaagaagactttgaagagaacaccgattactggaacttccgtcttgagaagatgcgtgctgtgctcgcccaccgcggcaacgatgccagaggacgtttccttaaaaagcatattggtctgtcacacagccgtctggccatccgtgatatcctgtgcggcgaccagccaatgacgcgtacccacaatggctatgattacacaatctgctataacggtgagatttacaacacggatgagctgattccagagctgtccgaaaacggctttgtatgctccacaacctcagacacagaggttattctgtacgcctacatccattggggcgctgattttgtcaatcgcttaaacggtatttttgcatttgccatatgggatgcggctaaaagccggctgctattataccgcgaccgcgtaggtgtcaaaccgcttttttatgccatccgaggggattctctggtgtttggctccgagccaaaggcctgctttgcgcaccctgcagtaaagcctgagcttgacaaacagggcttgcaggagcttcttgctatcgggcctgcacacacgagcgggctttccctgtttaaggatttgtttgaggttttgccgggacacttcatgatttactcccgggatgggctgcatgatgaaacctactgggagcttacaagccgggaacacaccgagagctatcgggataccgttgctcacacacgttttctggtggaggacgctataaaaaggcagatggtttccgatgtgccggtatgtacttttctgtcaggcggcatcgattcaagcatcgtgactgccatcgccgcaaactatatgaacacacgcggtaaaacgctcaacactttttcattcgactttaaggacaatgacaggtattttaaggcaaacgccttccagccggagagggatctgccctatgtcaatcgtatgcttgaggaatatgagacagcccactcctatctcgagtgtgatgagaactctctcttcaaggctctctttgccgcagtcgatgcaaaggatatgcccggcatgaccgatgtggactcgtcacttttatatttctgcagcctcgtcagccgaaaaaataaggtagctcttaccggtgagtgtgctgatgaaatctttggcggatatccgtggttttaccgcaaagagctgctggaaagatatggcttcccatggtcatcggatgtcgctccacgccttgctcttttgcgcgatgatgtgggtttggagcttgatttatccggttatcaggcttttcgatatgaggagtccaggtcaaaagcacctctcctttacggcgaggccggtgaggacgaaagccgccgcataataggttatctcaatatcaaatggttcatgcagacgcttcttgaccgcatggatcgcaccagcatgtactccgagcttgaggcccgtgtaccttttgccgaccatcgtatcattgagtatgtctttaatgtgccttggcatatgaaatatcaaaacggtgtggaaaagactctgcttcgcgatgctttttcagatgtcctgccgcctgagcttttgcacagaaaaaagagcccatatccaaagacttatcatcccggatatgaagctctccttataaagggaatggaggagatattagactcccctaacgcccctgtgcgcactctcattgacgttgacaaaacgcgcgaatttttaaaggcaccggcagaatacggcagtccgtggtttggccagctcatggcaggtccgcagcttatcgcatatttcatccagattaattactggatggagaagtatcagctgtctgcctaatgctcatccatgactaattgaccttgcgctctatatcaatgatgttattctctatgatattgttttctgtaatgttgttatctatgctctctgccgaagaggtgctttcactattctgctccttcggtgtaaatcttctcaccttatccatgagctgagtcttcttcagctcatgcttaagctcaacacgctcactcttctgctgtcgttttttctccttaagctcgtacttggcctgcttctttgcgagcttattctgcctcttctgctcctttatggcagcctttgtctctcttttggcctgctttgccacaagctttgcttcttttgcttcgttctttatgcggctctttttatttttctttacgctctttttggcaaccttatgtagttccttaagatctgattttgcagcctttatattttttctgtccttgcggtatggattgtgcacaaagtatcccacagtgcctatcatcataagaagcagtgccagcgcctctccagccatcgtgacatactccagatactgcggatacagcttgtagcctgccatctccgccgctatcaggataagcggaatgaaaaacaatatattctttcgcttttgggacaataacgctccctccgcacctacacacatgagtacatacaggcacagctgcgaagtcggtccataggcatatgccacaatcgcagccattatcacagatatgcaaaacactatgaatgcttctccgcggaacagggcattcctgtactcttttatgccctccagcttgtctaccgatatgccatgcagtgaatatacctggtctgtgatatcctccatgcagtcctcatggtatcgcttaagctccctattgctgtttatatcagcatctatggagcgtctgcgctctgtaagcagcttctgctcctccatgatcttctcccaggcctcatcctctgcctcacgctgaagcttcacctgctcgtgaatccactcggcccgctggatgcgctcgctctcctgagggataaccatctgctgcgcgtcaactgtctgctgcgtcatgctgttattttccggctctgcagagtcaattttattttcattttcattatttatcattccgtttttctgcctctttcttctagacattttcttcctcttgcaattgttatttactgctatatatctctattaaagcatatttcagcggaattttccatagaatatgcgcatgatatccgcaaaccctgaaatttttggtgcccgataccattaaatttttcaaattagaattgagatttcatctattccaagtaatttcataattgttatattttattatcaaatacctctcaagcccttgaaaacactaagtttatcacaggttagctttcccttattatttcccttgtgttatatcgtcccgtcagtgtttacgaactctcataagggcaaatacaagggtgcaggacatccagtggatgtccgctttgcaccgaccgtagcgaagcggagaccaagaaaaatctataaaacagtataacacaaaataaaagtgacttggtgaactgattgaaatgcttctgatgtttataacgaatgattgattgaatgataaggagattctccatctgaccgccccatacagtgaagaacgccgagaggcggcgtgggagtataccagagaacacgatgctgccgacaggctgaaatgacgtggatttgttcataagtttgtgttatacttctttaataattgggcaacaaacagaaaatggaggcatctatgaaacataacaaccttataatcatgtctgcattagcacttgtgattagtttaaccgggtgcggaaatacaaataagctttccgaatatgacatgaccggaattagttttatagaatatactgacatagatacagtatgcgaagatgaagaactgataactgctggaagcaatttgctatctgactaagaggacaatttgctcctctcctatgtagtagatagcgctattgaactttctaccgagctgggagattatgaccatttggtgtttacaaatcccaaatggattgaaaactttggcgattctggcaaattaaaacccatagaatatagcagcttatcaaaaagtatgcaagagtttttagacagtcaaatgccgatattgacaaacgacggaagtgtattgccagaaggaacagggttatacgaatacgaaggtggcggtctgcttgcatttcctataaatgtaactcttggatcagcgaagccgatagaagcaaaaaatcctctggttatgctaatagacaatccggcagaaatactgaaagctgattcttgtatgttgcccttgacctcaagtggaaatgtgttgtttttggatagcgataatttacaacaagcttttgaaaatagtgagcttaaagattacggagatattcaaaagtttaataaaaaataacattttacaattacataaccaatccgagaggacagtcgagaaaatcgactgtcctttttctatgcctatgatcagaaaggagcgaccacccatgacaaagccaagagagaaaacccgcgaggagctgcaagccgagattgaaggcgcaaaagatccgcccataaaatagtagctctatgcgtcagctattttacgggcggtattctttattaagaatgatatacttaaacgcaagaagcatttcaccagttccgattgtctgatatcgaaaggagacacacgattatggcaaaaggatctgtaagaaaaaaaggaaagaaatggagcagcaccaaaggatgtgcaggaactgttagggcactcagatgtcagtaccaccatgaatgtctatgcacactctgcaagaaaagccaagcggaaatctgcaaggttacttgataaagtggcaggcaatgactaaataaaactttcccttatttcccttacaattatctcataagggcaaaaataagggaaaatacatatcgtttcgctaatgcacaggctggagagcctgtaaaatagggaaaggtttatggtgttgtcctggcagatatgaatatccgtacaagacgcgatgtcaagaaatttttagaaggactctctaccggaagttccagccttcttaagaatgtaaccgttggttatcattaccatacgattgaagctgaatccgaagagattttagatgatattcaaaatgaactcgcagaaaaaggttttctaatgcaatcaaggcgtcagtccggtatttccggaactgacgccttttaagcattggaaattgtcaatgccactgttttgtcttacatatacttcttcacaatattctccattactttccacttatgttccatatcagagacaagtttaaactgtgtccttgcccggtccaaattctgccccggtctgtgaattttaaaataaatgtctccctgaatataatccataagaaacctcattccacattcataggtcataagcctagcgcccatcggaagcagctttatctcttcctgtgaaagttttccaccacagccctctataaagcccttcgcacatgcttcaaaaagctctaaatcgcaccacactttatccagattttgttcatcctctaatgctgtacttgctccaatccgcaccgcatctccaaaatcattcatggctaccccaggcattacagtgtccaggtcaatcacacatattccttttttggtatccttatccatgaggacattattaatttttgtgtcattatgagtcacacgaaaactgattttcccacttctcagcaaatcctgaaagcagtccacaatttcttccctgtccaatacaaactgaatttcctcccggaccaaatccactctgctgcacacatcctcttccactgcctttttgaatgtctcaaatctttctctggtatcatgaaatcccggaattgtctcatgaagtgttttcgccggataatccgctaacatactttgaaatctgccaaatgccagaccgccctcataaagtatttcaggattatctatcaaatcatagcttacagtattttcaatgaatacataagctctccaatactcaccttccgagtccacgtaatagggtttcccgtcttttgcaggaatgacatttaatgtctccctctctggatttccaccgttagctgaaatttttctttttaaaaattcagtgactccaacgatattttccattaattcaaccgggtttttaaagatactcttgttcatctgctgtaaaatataatacttttttactccctgctcgttttcaaatgtaacacggtaagtatcattaatatgtccatttccccatggaatttcttctttatatacaccttcaaaacagaagtttgcagccgcttctaattttccgcagagctgttttggataaaaatcattctcttccagctttttcactgctgccataaccattggtttatcttccctgtaggtaactccataccacttttctgttgtaagaagaacttttacttctgctttattgctatctaacagtctgctgacgaccgacggaagataatattcacatttcagtggattatgttgcagaccctcctgcagaaaatcacgaaatccatacgcaatctctgacaaaaatcccttgctaaatccccataaattcatggaaacaatcgtatctcctgacaaatccgtataactttttccatcgtcttccgtatatgcagcattctctccacgttttacaattgttgtatgttctgttacactgacaagttttccattactatcaatatcacagacgcctcttgccacacttccattctccgtcaaagtatttttcaactgatatcctaccattgcatactgatacttatcattatcttcatgcacactcagataatcataaatctgcttaaatgcttctcttccataatagtcgtctgcattaatcactgcaaatggtccgtcaatcatatctttacagcttaaaattgcatgcgcagttccccatggctttactcttccggccggaacttcaaatccctccggcagattttccagctcctgaaatgcatatcttactttcataatcttttctatacgattccctatgacattatgaaaatcttccgcattctctctttttattacaaaaataacctcttcaaatcctgcaagataagcatcataaatagaaaaatcaacaataatatgtccatattcatctactggatcaatctgtttcattccaccgtaacggcttcccattccggctgccataattacaagtacaggtttcttcatattctttatacctcctgattaaacagtgtaccatttaatctcatttgcctctattttcaacgcaaaactgcttccatctccgcgatagataaccgtattctgtgactcgtaggtattatttacaacacagaatttgccattttttacatatgcatgtacttccacattgaaatttgtactaaaccactgatgtaataagttttcgccatgtgtactccacaaaatgcttcgataaagaattctgctgttctcaaagctatatggcagtccactgatatagaccgaacggccctcaccaaattcatgcacagccatctgaacttctttgtccctctgtaccagaatttctgttccctcatacgcaaacatatttttcttgccctctccgaagtcaacaggctttgttgtatctgcaagaataaagtgatttttgtgttcttcccagttatacttatcgtagtttaaggtaaatccggtttctttttccacaccaattaaatcagcaagctgcagataatgtccctgatactggtgtcctgccggttccccgacaccgataaatccaccgccccggtagacaaattcacgaatggctgcggaaataactgcattctcccagactgccccgccggtgtgtgccgtatccccgtccccgacattgataatgacatcaatatcctttaatatatccttatcctttaaaatatcatcaaatgaaataaatttcacatcaaacggtgcgccgcttaatgcctcgataattcccgcataactgtaattctgtttctgatataaggcatggtgtaccatatggcagccccagctgcggattttgccccagctgtttaaaacagcaaccttcttcacacagtatggtgttgttccttttgcattctcatatagttcacggaattcattgcacacgctctccacatagtccaaaaactccgggaaatctaatgcaagctttaaatatccgccatatccgatacggtcgattggttttcttaaaatggcacggcgtgctgtcacccagttttcctttgcttccttgacaggatctccgccctcatggaaggtatccgggaaaaagtatggaaggaatcttccttctgtatattttacaccttcaatatcagagatcagacgaagtgtacttccgtttccaacgcttcctaccactgcgtcaagaccgatcgttgcaaactcttccatgaatggttctgttccgatccagtgatcccccaaaaacatcattgcctctttgccgcattcatgtgtgatgtcaaccatctcttttgcaagctttgcaacttccctgcgctggaatgcctgaaaatccttatattctttaccaggtacacgatactgattgttataatatccctggtcaatgatatattccgggcggaatttataacccatttctttttcaaactgctctaaaatataaggacttactgacgcggaataaccataccaatccacatatttttcccgctttaactcgtcaaacatcaatgtaaactgatggaaaaacgtcgtatagcgaatgacattgacatatggatgctcctcgcagaatttacgcaggcgctccatggaatatttatgtgttttcggctgccgtacgtcaaacgtaatctgatgttcgaaatctttccagtcatttgtcaccgcattgtacatatgtaccggatcccagataatatatgccagaaagcttactgtatattcatgaaacggttctgcctcatgaatacagacgcaccctgactcctcattatattcccactgtttggtcgataccacctgacctgtggaacggtcaacaacctcccaccatcgtttaatatcatctcttgtattgacctgcattaactcatccgaaatccccttcatcagaggaatttgcagttcgctttcaacagccgtataaaatccactcataatataacactgctgcacctcatccgggttcgccctcgcccactcattatcttttctcgtggtgtagtaagttgcataaatctttgccccggtctttgtcagctcttccgggaattctgttccgtcacaatcgcggattgcatctgcaccccagcgtttcattaactcaattgtctctggaaccacatccagatttgtaggaattgtgacacgtcctgtatttttctcactcatttttcttcctcactctatttcatccatataattactttcttttcttcttttctgcaaaagggcaattataaatccacaatgccattaataaacagataattccaataagcataattcctaaacctgtcatttttcctgtcataccccatccaaaaacagacaggcttattccggcaataaaaagagctgccattaaaattattctgcattttgtgtgctttttccaaaattccattttaatctcccttctcatcaaccctttaaaccaccaacagtcattccctgtgtcagtttattctgaacacatatatataaaattaatgtaggaagcattactattacaagtcctgcatacataattccatactgtgctgctgactgctgtgcctgcatcagatttaataatcctaccggtaacgttttcggtccctttgccgaactcatcagtgtcatggaaatgatatattcattccaaaaagaaagaaaattaaacaagattatcgtaataatagatggttttgccattggaaaaataattttccacatcgttgtactataacctgctccatcaatatatgccgcctcttcataatcatgtgccaatgttgaaaaataccccgacaacagataaattgtaaacggaagtgctgttgcagcatatacgattgcaagtataaccagattatttaacagaaaacttttcccaattactgatttcagccaattgtccccatctcgcagcatcaaaaaaattggaacaacaatgtaattcacgttaataaaaagaccacccataaaagccgcatttaaaaatttacttcctttaaatttaaaacgtgacaaacagtaagctgccggcagcgcaacaattaaaagaattacaagtgccaaagctgtaaccaatacggagtttaacatgtaatctcccatttttgctgtattccaggcatcaataaagttctgaaaataaaaaccctccggcaaagtccacggatttccataaaactctttattttgcttaatggatgccataaacacccatgccaccggaataataatactgactgcaagcattattaaaactaaatagataaaaaatttatacaaccgttccgcagaattcggattttttttctctctcatattttctctccttaaaactccagtggttcacgctctgtaactttatttacaagtgcagacaatgcaaacgagaaaataaatattacaacacctattgccatactgtatccatataatccggcatccttctgtccatacatatagcttagtgacacttcagaagctccgtttgggccacctgaagtcatagcttttacaaaaagaaatgccatattaatagtagaaataataaaaaatgttaatgttgtacgaatattagtccagatcaacggaattgtaatctgaaaaaactgaacgagcctgcctgcaccatctaatccggcactttcatacaggcttttcggcacactcgccatagatgccatgtacatgaccatatagtaaccaatcgcctgccagatcattgcaataataagactgacgatcacaagcgattcacctttccacaaaatcgggttctccattttatgaaacagtccgataatactatttagcattccgttctccggcttataaattgcagaaaaaatacctgcaattactacaaccgataaaatattgggaatataaaaaataatacggaaaaaattctgtcccctgatttgttctcttgacagaatgcctgcaaaaacaagtgcaaatgcaaaggtaactattgtaacaacaacaataagtaaaatcatgttttgcatggaccttataaaattagtatccgatattaatgttttaaaatttttcaggccaacaaatgtttcattcggtgaatatgcacctttttcaaataacgacatccggaatacatttaaggtaggcaatatcataaacacaaaaaataaaattactgctggtgctatgcataccgccaaaaaaccgcttcgtcctctggcttttttcatactttcacgttcctttcaaacaaaccgtactatttaaaattcggcggacaaaaattctgtccgccgactcatttttaccactatagcattaaggcaaactaaaaactcttatttcaaattcgcccgcatctggtcacttgccgaaataattccgtcaatccatgcctgctcatccatatcgcctgatactaatgagtttaccgggtcaaagaatactgttcgcacttccacgcccggaattgcttcaaatgctgcgaaattacccatagctgcctttgctccattatcataaatagagtagaacattacgttatcaccacttaatttgtctgcaatgcctaatactggctggatagctcctgcttttgcaaaaatttcacatgctttgtcactgtataaataagagataaataattttgctgcatcctgatgctctgcaccagaaggaatccatgcctgctcaaaccatgtataactgtatgcatctccgccatcttttactgccggaagagctgtcattccccacttaaatccatctgcacgaggtgcttctgccatttctccaacgatccatgttccatttggcataaagattgctttattgtcaagtactaactgctgattctgtgtgaagtcctgatcatttgcctgcgcaggtgtgaccggatttgtgtactcagctaactttgcaacaatatcaaagcatgtctgtgcttccggagtttcccagatgccttccgcataatttgttgctttatcaaaaaattccggaccacctgctgaatacatcagtgcgtagaagaatgcatcaaaataacctgttgtaggatatgtaaataagtaaattccctcttcttttgctttatctcctaattcccacatttcatcccatgtctttggaacatcccatcctttttcttctaaaagacctgcattataaaacagaccacatggagaataaaacattggtgcaagatatgtctttccatcaccataaggattggtcaatgatgtgtctgtaaatcctcctgcaatcttctctgaaacaagtttgtcttctcccggaactttcatagataaaacatctgtaatgtcagtaatcatatgtcccttaataaactgttccgtcaacgcagcttcacgtcccgtggcaagatgaataacatccgggtattcgcctccctgcatggatggtccaattacatcctctaattttttatctgttgtaagttctactttaattccggtttcttctgtaaatgcatctgccactttctgccacatttcagaaccataagctgtctcaatagcagctacactgattgttgttccagcttcttttgtcttgctggtatctgacgcagaattctcctttcctgaatctgtaccgcaccctgcaaataaagatgctaccattaccatactcatcattgtacataaaatttttttcttcatagtaacctcccatttttgttattttttactataaattcttatgtttccttccttacatttgttattatagagtacgccatctctttttcctatccatatattgctctatattttataattcttgctttattttaaaaatcttgttattttgtttttttcattgtatactaagtacaacatcgttccattttaactaggaaatcattgcaattatgacatgaaaggagtgtattttccatgagtaaccgcaaatttaatctggataatgaggtacagccggaaatccatttccgcctgctttccatatcagcatccaaatttgaaaatgactggacttcgtttccccacagccatcattttacggaaatcttctttattaaagacggcaccggacgcatgctgattgaaaatgaatctcttcctgtctcctcaaacagccttgtcgtgatcggtgcacaggtaacacacacagagttttccgatccggaaaatccactggattattatgtgctcggggtggaaggattaaaactgaatactgacaaagaaccggaatacattcatgtcccggcttctgcaaactcgccttttatccgccagtgttttgaaaatatcctgcgggaaatgcataacaaacaggaccgctacgcagagatctgccagcattatctggatattttaattttatatttctgccggaaagaccatgtatcctatgaagtggtggatgcgcagaacagcagccgcgaatgccacaaggtaaaacgctttatcgagcacaattaccagagcatgatctctctggattcgcttgccgaaaactgcagtctctcaaaatattacctttcacaccgttttgcagagctgtacgggaaatctcccatcgcttacctgaacgaagttcggctggcgtctgcgcgtgacctgctgctcacaaccaatcacagtatcgaagagattgccggatgtatcgggttttcctctaccagctatttttcgcagtccttccagaaaaattttcatgaatcgccacagcagttccgcaaatcccaccgtgtcaggacatgaccatgtttcattttttacataaaaaaataattttctaaaaatttccccgaaagaatatcatatctttcggggaaactatgcctatcagccggattggaaagagaaaaaagaaaataattaatcggtcttatattaaaaatcccggaaatccgcttatctgcagattccgggattttataattacatatgatgtgccacatctattctgataagtgccttcctgagtgcaaactctgctctcttcacatcaatctctgctgtgtgatttgaaaggcgctgctctgcccgctcctttgcggcctgtgcgcggtctatggtttttgtatacaccaatctctccgttttgggtattgaactcgaggaaatctgtcgctcccttgtagaacaccctgtccggtgtgattatttctatgtcaagatgcgctcgctctcctgcggtataaccatctgctgcgcgtcaactgtctgctgcggtgtttgagtctcctgcgtcatgctgttattttccttttctttatttatcattccggttttctgcctctttcttctagacattttcttttcctcttgcagtcgttatcctgctatccaaatgttatctgattattttttcatgtactcttctataatacactgatgcttctttgtcttcttatcatagcttatgccgacaagcattttcaatatcctgccgtatctcctcatttggaataaacgcacaactctttttctgatcaaatcccagataccctaaatgaacaagatatgttaaaacatcatctttatttttaaagctaaccgtatcattcataaaactgccagtgttcacctttatttctccaccggacagcatctgaattattgcggtctttaatccatcaaaatccaaatttataagtggaactatgacatcataagacccggtctctgaccaataactctttaagtctccctgaagcatgtaatttactactgcacgcggattgtatacatggcaatctcccagcatatatccatcataccaccgctctacctggctaaaatccctgccatagcgatcacatatgtccctgacctcatcctcagtaaagccaatatatggggacaaacgtcccgcatataacatggtatattcatcaaaattattaagtgccgactgcgtctttagcttttttatcggtaaaattcctgtgagaaatgcaagctctatatactttgttggttcacttcccttaaacattccgcgcaggaaattgatatattcctcctgaactgaggaatttgctgcttcatcacgtatcaaaacatcccactcatcgattataattacaaatttattgttcgtcatactgttaataaccgatagagcaccatacaatgttttctgatctcttaaatcaatatccttgtacagatctgccaactctgatataacatttttatttatatatcctgatattctttccggcgcaccggcatccattagtatccactgcatatcgagatgaataacatcatacttgttgagatatttctcaaagtattctgtctgtgcaatgttatagttcataaataattctctggaatcacagcccttgctgtaatatgctgtaagcatatcggccgtaatagacttgccaaaccttctcggccggctattacatatatatgcctgctttgttccaagcacactattggtaaaatcgagcaagtctgttttgtctatatatatctcggaagctaatgctaccttgaatgcactgtttccaggatttacaaatctccccattgtgttcatctcctttactgctatatatcttctattaaagcatattttagcggaattttccataggatatcttgccattaaaacaaatattatactcaatataaaaatagcataacaatggtatttacaatatcatcattacgctattccataactatatttttactgtggcatatcccttcttaaaggactactttcataatttaaagttttagctcctgctagccgtttcatctcatccattaatggatgttttttccatttatgagtatcctctgttatttggtaacttaatatttgaaaaaatggtaaaaaagcaagaggtgtaataagctcgtttatttcaaagtcgggatttattatatttttcccttcaagtccttttttatttgtaagcatataggttttatccgttataacgcctgtagcctcaaatatctcttgtgttctatcagaagcaagacctccgtcaataaaaaacactgtataatttggtgtaagttgaagattaggtccatgtatatattcttctaattcatatgctatgcccggaacctgaatagtttcacctactttaagtgctccctccatagccgttcccatatttgcacctacactacatatatatactgtttgaagcgatgttaatgctttaatgttatcagcataaaatttctttgtcgcaactatcattttttcatgcgcaccgcttaccttttcaaattctcttacccaagtgtcatattcattctggcctattattttacacattttagcggcttccaaagcaaatagcataagataaagtgacaatgcaattacaccttttgttacatatcctaccgtttcctcaccaacgccaaaatcaactgccaggtctgcaaccgatactatatcactattcaagtcacctgttagtacaattgactttctagtcagttcatcatttataaacttaagtgcttccatagtatttacactatatccactctgagaaacagctataaccatttcatctgacgcaacgctatgctctgcgtgaataaattcaaatggtgatataactgtaactttgcatttcaacactttttccatatatagtcttgcacactgagcagcattattcgaagatccggatgcaactatagtaatattatgatatggtcctttgatatattcattaaccatggtttctgtcaatgctattcgtttttttagattttcctcaattaattctgttgaagagttgatataatcaaacatagttttagccatatttcaaaatcctttctataaaatatacccactgaattatccagtgggtataaattgagtagtaacaaatattgacttatacccccagtattccagtaagacttcccaaaatacctataataaatataagtatcaatgcccaggttgtcttcatcttctttttggtaaccagccagtatataaatcctgtaaataataatggtaacagacacggaacaattccatttattacatcagctataacaacacttgtatctccgtttgtatacgttaatggaatattcaccgtaaccatagttgctatcatagaaccaattgacataagtcccaatattgatgcagcatacgtaagcttttccattagtccacccgctgcaatttttgataaaaatccagctccaaacttatatccgcccatcatacatatgtatctcagaattacatgtggtatattaaacaataggaagaataaaattggtcccagaatattcccgttcatagcaagtgatgttcctattccagttgcaattattcgaagtgttccccacataaaagaatcacctatacctgcaagcggtcccattaatcctgcttttacactattgatggatgatgtgtcaaaattctcatcgagcgcattttcttcttccatagctgtactaattccaagaattaatgttaccatatgtggagttgtattaaaaaattccaagtgtctctgtaatgctgctgctttttcctccggtttgtccttatacagtttctcaataatcggaatcatagcatacgtataacctagattttgctgtttttcataattccatgtccactccattggaaaagatctgaagaatacttttctaagatctctctttgtaattaatttagaagtcgtcatcttcatcacctcccatttctgtagctgttataacctgattattctgcatatttactattataagagctataactgttgcaaaaagtgcaactcctgttactgacattcccatgtatgcagaaatgagaaatcccaataataagaaataccaattctttttatttattatcatgcttgcaagaactgcaaatccgagagccggcatcaagccagttgcaattgtaagtcctgattttataaattgtggaatagcatccaacacactctgaataactgtatttcctaataagaatgctgaaaatacaaatattccatacggaagattcaaatataggaatcctcctagcatgtgcattcttgcaacacctttactatttcctttaacagcataatcatctgccttgtgtacaaaaatcggcaaaataaatattttacatgcatttttcatcaaaagtgctaatgaagcaataggtacgccaattgtaagtgcaacctcaggatcattccctgctgcaagtgtcaaagcagctccaagcacacctccagaaatcatatctggtggaagtgatgcccctacagaaaatgcacctataaatgcaagctccatcattgccccaataataattccactttttaaatcgcccataaccagcccagttaatgtacacattattaatggtcggtctaataggtttgttccaaacaagaaattagtatgtcctaacatggcaactaatcccaataatatagcctttaatatcatatcagtccctcctacaatacatcctttgcataaattactgaatcacttggaacctgccttatctccacagtaactccatcagtaatcaactcctttatgagttcttcctcttttggtgttgtaaatactgcttttgatatctgccttgtcccctctcttgatttaacaccaccaagcgtgatcttatcaatcattcctgtttccttgcacagtttgtatacatcagcaatactctctacaacaataaataacttatatttatctgttacacctgacacaagagcttctacagatgcatccatattctttataacaagctttgtattcgctggttttgcaagttttattccagcttttctgatttcatcgtttggcacactatcattggctattaaaatgcaatcacttcctaatacctgattccaggccattgcaacctgtccatgtagtaaacgatggtctactctgacatttactatcatcctatatacccctttctttaaaattcgtcatcttctaacgaatcaatacctgtcctactgcaaaaatttattacactgtctgctatacccaaaagttcttcctcaacctcagcagcattatttttcatttctactatagacattgctgttataacaagtgccagattcattccagcaataagccttatttgcggattagaaatatacttcataaactcattattcacacttccaccaaataaatctgtaaaaatgatccagctgtcatccggtgcaatgctatcaatgaaaccttttattcttgtcgatacatcatcttctccgtctacatatgcacatataacactgacattatcctgctttccaaaaaccatttctgctgacgaaagcattcctgctgccagatttccgtgtgacgctagcataattttaaccatctgtccacctcctcttttatatttattttatttattgatttactttattatccattttataattataatatatctttacaattattttaaggagaattatatggatagtcattcatcaaagtatatttatgacacccttaaaggtgacattgagaacaatttatattctttcggttcagccctgccgtctgaatgtacactggctgaaaaatactttgtaagccgaaccactgtccgtaatgctattgagcagcttgtacacgatggtctgctatacaagattcaaggtaaaggtacttatgtatccatgcctaagcttcatgctaccaattctgtaacctctacaagaaaatacttaaaagaccatcatctcaaaccttcaaccaaaattataacatctggaataaggaatgccgggtacaaatattcaaatatatttaatatttctgaatctgatcaactttttttcgtatatcgtcaaagattaggtaataaaataccttattctgtcgaatatacttttttaccatttgcctatgttcctaatgcgcaaagctataattttgccaaagaatctttatatgactgttttaatgataacaatataattgttgatcatacggttcaaactatagatttggtcaaaatatttaaaccgcaatctgatattcttcaacagcccgatggttccgcctcatttaaaagagtgaatactgtgtacgatatacacaatcgcgttgtcgaatatacattatcatattctttagctgataaatttaaatttagaagtatacacccagacgaggtagaacaggcaatagcaattgagcagatatgtttcccaccgaatgaggcatgttctccaaaggcaatgacagagagaattgcaaaggtaccacagttatttctcgtggcaattgacaaatcaaccggtaagctggcgggctttttaaatggtgtggcaacagacgaggaaaagttcagggatgagttcttcacggacatcgatttatgtgatgaaaacggtaagaatgtgatgcttctgggccttgacgtgcttccggagtatcgtggacagggcctcgccagagagctcgtgtaccgctacagtcagcgtgaaaaggcaaacggacgaaaaaagctgtttctgacatgcttagagcagaaggtggagatgtataagaagtttggattgcaggatctggggattgctgactctacctggggcggagaagagtggcatgagatggtgttaaagggatgaatgtgataatatggaaaatatttcatagtttattctttggctactgcatataatagttatagatacgacataaatattgacaataaaaatataaaaatggtactatatatgcggaggtgagactatgttgaaatcttacttgttagagaattatggatataatgaaccaatctttttaaatgatttgaaaatagaagaattatcagagaatgcagtgcgccagtcggtaaagagacttgtggcaaatggttttctggaaaggtatgataatggtatttattatatacccaaacagggtggattactaggtaaaagttatcttgatccatttcttgttattatgcgcaaatatgtgagaagtaaatcagaaacatttggttatgtgaccggaatatcatttgtaaatcagcttggattgacgacacaaatgccagcgataattgagattgttactaacaaggaagctactaatggacgtacaattacggtaggcagtcagaaggttagaattaaaaaagctgcggttgctgtttcagacaacaatgcggaacttttgcagtttttggatggtattggtcagactgagaaatatacggagttgccgatggaagaaactatagatacaatgctctcatacgtgaaacagaaacattttacaaaagaacagttatctgaagtatcgtctgttataaccggtgcaactgcaaagaaattaattgaatgggggatgatttatgaatttgcatcatgataaagaagcatttgcagaactgattatcggtgcagcaaatgagttggctattccaactaatgtaattgaaaaagattattatgtgacgattaccctgaaggctcttgccgaaaaaactaaagacatggtgtttaaaggtggtacatcacttactaagtgttatcagttattggaccgattttcagaagatattgatttgtcttatacggcagagtcaggtatgccgggagagagtagaaagaaacaactcaaaaataatattgtttcgactatggaggagttcgggttcccgattaacaatcttgaaacaacaagaagcagaagaaactataattgctacagagcaagttacccatccttttatgaacagaatggtattttgaaaccggaattggtaatagaaacatatgtagcaatgttgccgtttccaaccacaaaacgtatggtagataattatatctatcgtttcttaagtgaaatcaatcgattggatttggctgaaacatatgaattgatgccttttaaaattacaacacaaaccatagagagaactctggtagataaggtgtttgcattgtgtgattactatatgcaagaaaagacagagcggcattccagacatttatacgatattcataagattgtagaaactatgggaatctcaaatgaactaccaaatcttataccggaagtgcgtgctgtgcgctcggaaatgattgtctgcccgtctgcaaaagaaggtgtatgtgtggctgatatattgagggagataatcaatagtcaggtgtataaaagagattacgaagatattactatgggattgctttttgtaccggtaggttatgagaccgtaattcagagtttgcagaaggttttggatagcgggatgtgggaataaaatttgaaattcttaaattataggctttaaattagagtaaaatcagtggaatcgatggcatgagatggtgctaaagggatgaatgtgataacatggaaaataaagtatcagataacgttatagaaaaaaattatagggagtgccttaaattcaatgaaatcaacgaaagcaaagtcgataattttgacctggcaacagcaaaggctgcccttgaaaatctgtatgagctatacaaaaatggcatattaacaggtcgtttcacaaaggataaggactatgtagtaaggtgtgctgacctggtaacattggcggaggagaacaaagacagcttgttttatgatgcatggcgcgtatggtttagatactttgtatcgatgggatatgcaggatggaatgagctgtgggaggcagtatgaataaacaaaaaatagcagaactacgcgccggtttggaaaccggcttcatcaatagtggatacaattcaagcctggcttatcagccgcaatttttgtcaaacaaccataaagaaggcaaaaaagtattatcctcaatagaagatgagctgatgtcctgtgacaaatttcagataagcgttgcgtttatcacgatgggaggcattacgccgttactccagacacttaaggagctggagaaaaatggtattccgggagaaattctcacaacaaattatctgaatttcagtgagccaaaggcgcttgagaagcttcacggattgtcgaatatcacgctcaaaatgtatgatgtggagaaggccgctgaaggctttcacacaaagggatatatattcaaaaaagaagagatttaccgaatcattatcggaagctcaaatatgacaagcgccgcacttacgagcaacagagagtggaatacaaaggttgtttctacagagcagggagaggtggcaaagcagattgttgaggaatacaatgagctttggaattcgcgctatgctatttcctttgacaacttttatgaggagtataaagagcgctatcaaatcataaaaagacagcgtgagattgcaaagagcgaggaaactccatccattgaaaaatacagattaaagccaaatgcaatgcaggttggctttatcacaaatctgagaaaaatactggaaaaaggtgaggatagggcacttctcatatcagctacgggtaccggaaaaacatatgcatctgcgtttgccatgcgcgagctgggctttaaacgagtactgtttctcgtacacagaggtcagcttgcaagacagacaaaaaaatcatacgaaaagatttttgataaatcagtttctatgggacttgtcggtgctgggtacagtgattatgacagggattatgtttttgcaacggtacagaccttaaatcgtgatgagcatttgagaaaatatgcaccggatgactttgattgtataattttggatgaggcgcaccacagctcggccaacatataccagaaagtgatgaactatttcacacccaagctgtggcttggaatgacagcgactcccgataagcgcgatgatgatattgacggaaaaaatatttaccagatttttaattatcagattgcatatgagattcgtttgcagcaggctatggaggaaaacatgctgtgcccattccactactttggaataacagatgtttcactgcttggtgacaaggagataaagagtaaaaagcttacagaatcatcgttcaaccagcttgttggtgatgagagggtaaagcatatcattgagcaggccaattattttggacatagcggcgacagggtgaagggactgattttttgcagcaggatagatgaatcagtcgaattatcgaataagtttaatcagacaataaatcctgagacaggcagatttttccgtacaattgcattaaatggagatgccaccgaggaggagagacagagagcctttgagcggcttgcgatggatgaggatgaaaacatgcagccactggattacatattttccgtcgaaattttaaatgagggtgttgatatcgtggaagtaaaccaggtcatcatgctcaggccgacagaatcgccaattgtatttatacagcagctaggacgtggacttagaaaagcaaatggcaaggaatatgttgtgatacttgatttcatcggcaactataacaataattttatgataccggtcgcattgtcgggagaccgttcttacaatgcagatacaatcagaaagtatgttatcagcggaaataatacgattcccggcgcttcgacagtgcattttgatgagattgcaaaggataggatttttgcgtcgatagacaaaataaagggcatgaaatccattatcagggagagctatgtttctttgaaaaaccggcttggaagagtgccgtatctattggatttttatgaaaacggagaggttgacccacttgtaataataaaagagtacaagacatatcaggcatttcttgaagcggttgagaaggagctttatatcggcagattaaatgagcaggaaaaaacaactcttgagtatttgtcgaagactatcctaagtggcgcgagaccgtttgaattagagattttaaggcagcttatgaagaagccttctatttcaattaatgagataagagagattttcatacggaggtacgattacaaggtaaatatgcaatccattgacaatgcggcagatgtattgcaaggaaagtttgtcagcaaggatgatgagtacaagagattttgcaggatagatattttggaggaggacagcaataacatcttccataggatgaataactttaccaccagacttcaaaatgaagagtttaaaaagcagatagatgacataatagaggtgggactcaaaagatatcatgataaatatcagtcctcacttaaaaatgagagtccgtttgtattgtatgagaaatactccaggcgtgatgtaagtctgctgatgaattgtggtagggatctttcttccacaatgtatggaatgaagcgtatagatgatgatgtatttatatttgtcacgtatcataaagaggaaagcacagacgagcagaaaagctatgtagatggaaagccggattacgcggatgcatttgaagacaatatgattttcaggtgggattcgcagattggcaggggtgtggacagctcatatgtgtcagatgtggtgaacactaaaagaaagcatctgcttgtgaaaaagagtgatgcggagtcaaatttttactatatgggagagtttgatatagttgatgtgtgcgctgccagaaagcgtgataacaatggcaaagagcgcgatatcaccaagtttgagatgaagatgcatcaccctgtaagagaggatctgcttcgatatttgcagagtaatttacaacaaggcttacaaaataatacacaggagtttaaggcaatatgaaaacaatacgcgtagtggctgccgtcataagagcagtcaataatgaaaataaaccggttatctttgcaacccagagaggctacggagagttcaagggcggctgggagtttccaggcggtaagattgagtctggtgagacaccgcagcaggcgctaaagcgcgagataatggaggagcttgacacggaaattgctgtcggagaattgatagatacgatagaatacgattatcctaatttccatctctcaatggattgcttctggtgtgaggtcattcgaggtgagcttatactaaaggaagcggaggatgcaaagtggcttacaagggagcatctggcggacgtaaagtggctaccggcggatgtgacattgattgagaacattagagaggcgatgtattaaatccaggacagcaaagagcatggaaaggtgactaaaaaaccatgcatccgtcaatcatagaaaaagactttttgttatgcggacgttcgttttcctttacctcgccctacggtcattctcttgaagtcgggcgacatgtggaacacatttaggagaatttgaacctacaaatgcaagacggtaggggtgtggaaatctctacaggataggctcctggggaacgaggggggcacgcgtgcaaaatcgcgaaatggagtaggggggatctcaaatacaaggaatgaaaatgcgacattctaatatataatgttataattttgtaacatcacatcttgacttttgctatttatatgttatgattaatgcacaaatggagggataatcatgaatgaattattaggaagccgtattaaggctttgagaatagctaaaaatttaacacaggaacaggttgctgaccaaatcggtgtgagtagacaaaagtatgcacgtgttgaaagcggaactaatagtattacattagatatcctttctaaagttgcagagattttagatgtgacagttggcgacatcactagagtactagatgaaacaccggttgtagcttatcgcactggtggtacagagtcttcctcagagaagatcttcgatatgctggatcttttttatgccaataagcatatgtataacaagcttcaaaataataatattagataaaggaggagtatgttatgcaggaaagcagaagaaaggatattcgaagaactgcagccgttgtacgcgaaaaatgtaaggttagtcgatacggcattatagatttatttaaggaatgtgctcgattaggatataagcttatacgatatccactcggggaaaacgctgatcttggatttactataaaaaaagatcaggatattgttattttcacaaattctagtattcgtttgtcgagagaaatttttacattggcacatgaacttggacatgcagtccttcatatggaagctgattcatcatttattgatgatagtattactattgcagatagaagtaccgatgagcgagagcaggaagcaaattattttgcggcatgtcttttaatgccagatgatgaagtggatcgtttctttgatttagaattgtctgatattgagaaaaacggattgactgcgatagatatcgcaaaaattatgtctgaatttaatgtcagttttgacatggcattgaatcgtcttgatagccttggaaaaattactggtaatcaaaaggccctattggattgccaacgtaataaaactagagttggtaatttgttgaaaagtgcgggcggaaatgcgagacttaaccaggcaagcgaagagatagatattccttttgagtacattgattatgtaatttacaattataatcatgatgctattccggttgagacgcttgaaaaagtgttagaatgctatcaattaagcatggacgatattagcgatagattgattgaaaagaaacatgaagaggatgatttgaatgatttgataggaggtttggaagattgagagcctcattagatacaaatgtaatcattcatctatatagagccgaacttcaaggaattttatttgatctatttgatgaaggtgtttttatctatgagcagattcgttcgatggaacttgaacatcatgggcaggacatccttacaaaagtagattcggatattaacgctggtaaaatagaactttttacggatcaaaagcttaaggatttagcggtttataagatgtttgaaaataatgtgcgggaaaaccgaatattatataatgcgggtgatctaggagaagtgtatgcgatttctttggcacaaactataggcgcatattcattggtcacagatgatacaaagcaaggtggaccatatatgtcattacttcaattagattatgatataatgccttttacttttgcagatgtgcttattttgagatacttaatgggtattgttgatgcagagcaaactgtggaagattttgaactggtgaataaccaatcacaactaaattggtcgttcaggagtcaaatttcaaaattcattaaaaggttttttaaggaaccttatcgtgaagaagagagacaatggattaaggatttggcgacgaaatacaatataagcataaaacagaaattggctgaattaagcagcaaacttacataaaaatttttagaggaccttttcgcaggtccttttattatacagaaaatttggaaaggaggttatggcaggaagaaagccaaagccaacagcagtaaagccggttggatgatgaggctgaccggtttttcttatgtgggcaggattgaaaatttacgagatttggtgtactataaattatacggaaaagataacttttggtttccgtttgaggtatcagatatggttaagaacaatattgaattagacgtaaaaacaaagtgcatagagcaaggtaagacccaggtaaatctggcagaggagatagaaaccacgaaggcttatgtgaatcgtgtgatcaagaagcaggatggtgtggtgaatcagacctttgttaagatgatggaagcgctggggtatgatatagagttgaggtatgtggagcgaaaataatatatgtcagtaaatagtagactgtgtaaagataacggaaaggtggaatgctacgcatggaggatggtgctaaagaaaatacagcgttaaatattcagaaaccactggaaattctagtgacagatgaagataagcatggtactgatatcgcatgcatgagtgatttttttggaatatatattgagcaactttcagcagaactgagcaatcaagtgatgcgtggtgttgtagaaaaaatacctgcagcagatgtacaaattttaggggaacttgtacatggtgttgatgttttgctgagtgggaagtatggatacattccagattttgacagccttccaaatgatgtaaaagataaacttaaaaaaggtatttacacattgggagagtcaagacaggtcgaagataatgttagagctgtggttcttgatgaaaatggtacgagaattaaagatgtgacgttaaagagggttttgaatactccagataccttggaaatgtccagaagtataacaagccaagttcaaatgagacaaatagctgcaaaattagatgaaatagcagaaactcaaagctatctaattgaaatggaacgaaacaataacattattaagccttttttaaatgctcgtgatcttattcttagagcacaaaatgcgaaaacgatagatgagcgtaagcattatatgatagaggcatctaaagaattaaacgatgtgataaatgcatctaggttagatctgaaaacaagttctgaacatttggcaaagctaacacgttttccaattttaagaaattcaagtcaaattaagaattatatgggatatgtggcacaggatttacagcttactacaaagtatgttggagtccaaatgcatgtgcttgattatcttggagattacgaaacagcaaatgaagtacttagtagctaccaaatgatgctatcggattttgcggatagaccgataaataagaaaaatcagtctacagctatcctaatgcagaataattcaacttattctgagcaaactcaagattattggcttaacttcagaagcaatataaaggaaactattaagacgggaagtttgttgcaagatagggaaatgattgttgtttccatagaggatataaaagatgcgtgaaaataaaaagtgttgggcatgcggaaagtcgctgacaggaggagaaaaattaggactgtgtgacggctgcttaaataaatatggaactcctgcagcggcggttgcggctctaggtataggtataggagcgaaattctttattaagaatggtggaaagattgtaaagaatgcattgaaaattttgaataaataaatttgaggaggaaccaatctggaagatttaatacaaaacaaaataactgatttttttcttgatgttacagaaacggatgagttcaaatcagtagaatatttgattttttcgattagaaaacaatatttgaattatctatctcaagccagaaaaaagcaatttgaaattcctaagtatttagagctgttagttgataaagcaattgatttatttaatctgtcaggaattagttgcgttgatatgcttcagtatatgttagaacatgatataaataattgggttcattattatgcttatacatttataattccaatcgcacagggaaaaagtagtgaatgtgttaaggatttaagtgatttatatgcacttgttatgactggctatatattggatgacttcggatttaatcgcttaaatattgaggagattgtaaagggagaacaattaacacataaaaaaaatcagtatggattatctgttgtaaatggtgtggtatttcacaatgattattttgtatttgaaaataaagcatatttgtataatatcttgacaaacataatcccagtttcatttggtgatgtgatgccaggatttgcaagagtaatttcagaacaaagggaagtgggaaatattcttttacggttagatgatcgtttagcattaccagaagaacaggcaatatcctattcgacattgaattttgaaaagtatagaggtccgcagttccactttaaggatacattgttaaaaacatcaaagacaatctcagtccattttaatggcaaaacaatggataagttgttgatggttgtaaaacagaaatttgacgaaaaagagaataaatctttctggcacatagaattagaaacattaccatacaggaatcgagagtcaaagggaaagtactgcattaccacatttttgcatggaatgtattatccagatgaagatatatttacacatattgattacactaaaaatcaatatgatattgatacatacctaaataaatactctgattgtaacgaagacatgccgatagatacgtatacttcgtctaatgaattgcactataaaatttggtgtatcgaaggtggtaagtactcaagagaaacgtggtataggctaatggtggtttctttaaatcaagagtatgttgaattgttagatgaaatattagagtagaaaggtactgattttctgccatcgaaaaaaatggcaaaaaaatttgttagacatatcttgacatgtataagaagttttgctatgccggatggaatgagctgtgggaggcagtatgaaccaaatttgcagggatattttcagagccatacatgagggtaaatggctgaaaatagaatatcgaaacaaggcagatcaggtgacgaaatattggatagggataagagaccttgatccgagaagccgaactatgaaggttgatggacttcatctgggacagcttacgattggagaatatgacaggatatttatcgattcaatattgtctactgagataatagaggggacatactgccctgaaaacaagatacttgttgaagatattgagatgcatccagagcgttacaaaaatatatttgacagctcagcaaatttaaaaatactaaattatcttgagatatgtaataagcttgatacgactccgtatatcacagattacgatttgattcattacattgatagagataggattaactgtggtatgtatcagcttacagaccagcagttcagggaagtggttgctcaatttcagtatttttcatcgcgggaaaaaagaaaaagcggatcattaaaagttaagaggctggcaataaatgtcctgagtataaacactaataaaggactctatgttcttgcatatagaaatctaaatcttgatgtaaaaaatcatatttttaaaccggatgaggagattacagtgtgtacgcagttttctatagatggaaaacaggaaaatgcaaggaaatttttagatgccgatgaatatgagcttttggaggattttgagaaaaatctggaaaaaataaaggatgcaataactgagcatggtggcaacaaatccatagtagatgatatgccgtatgttattggacttggcatggacgtggttctcaatctgcacgaagaatataaggcaattatggatatgtttgaggctgataatgtgacatatccaataaaggctttttttggagagcttcttgagagaccaagaaggacgaaggcatatccgattgcactgattaataaaaatataaatctggatcagctgcttgcgataaacaatgctatgaaatatcctcttgcatatattcagggaccacctggcacaggcaaaacaaatactataataaacacgatagtaacagcattttttaataatgttacagtgctgtttgcatcatataataatgtcccgatagataatgtttttgaaaagctctcatccatgaagtatcgcgggaagacaatcccatttccggtgcttcgcctggggaatacagaaaaagtaatggaggcaattaaatatattaatgagctgcgtacacaggtgcagtcattgcagatttttgcctctacacttgataagcggaaggatgatcgtatagacagggcaaagcgtttgtctgcacgtctaaaggaatatgaggaaattctggatttaaaggagagaaaagagacacttacacatctgatgaaatatcaggaacatatgaaaaatactatgaagctattgccgtttcagacagatctgcaaggctatcagatgcagaagcttgataaaaggatagctgctatcggtgagatatcggatactgatgctatgcagcttctggatagaaatgaggatgaattttatcagtatctgttttacacgtctgcgcggtatataaaggcactcgaggaacctaaattccaagagcttagacagatactggattctgatgagacaccagagaagctggtgaatgagtttaacaaatatatgcgtaaatctgaaaatgtaagaaagcttcagcgagtttttcctataatcataacgacatgcatttctgcgcataaaataggtgagcctgagcctttatttgatatgacaattatggatgaggcaagtcagtgtaatgtggcaatctcacttgtgcctataatcagaggagaaaaactgatgctggtgggagatccgcaacagctaaatccggttatcctgcttggagaactgacaaacaaaaagcttcgtcgcaggtatcatgtatcagatgagtacgattatagggaaaattcaatctataaaacatatcttgcctgtgatgcagtaagtgatgaggtgcttctgagaaatcactatagatgcaataaagaaataataggttttaacaataaaaaatactataactcaaagctcaagatacagtcaaagagtaaggagcctgaaccgctcgtttatatggatgtgaaaagcgataacacacagataaaaaatacttctccggctgaggttgaggaagtggtggaatatgcgcttttaaataaagataaaagcattgccgtgattacgccgtttgtcaatcaaaagcaattgattgaaaatgcaataaagcagaataaactgagcaatcttgtctgtggaacggttcatgcatttcagggcgatgagaaggatgtagtactgttttctacagcaatttctgaaaggacaagctcaggtacatataactggcttaaaaataataaggagctcataaatgttgcgacatccagagcaaaggagaagctggtacttctcacaaacggaaaagaactggaaagactgcatgcgggacaagctgatgatgatttgtatgagctggcgcagtatgtaaagaccaatggccactcaaaaattactgaaaagcatataagctcacgagcactgggaatacagccgttctcgacggctacagaaaatgcgtttcttgaaaatttaacccatgctcttgaaaatatctggctttcgcagagtaaatatgtaatacacaaggaggttgccatatcacaggtattcagagataacataacctatgatgatttgttttacatgggacgttttgattttgttgtatacgaaaaacaaggcagaagcgaattgccaatacttgccatagaattagatggcaaagaacactttgaggatgcggtggtgaaagagcgggacagaaagaaaaatgcgatatgcaaggcacacaacatggaaattatccgggtggaaaactcatatgcgagaagatataatcatatcaaaggaatattgatggattatttttcaagggtgcattaagggaggaaacctaaatccaagcaatggtttaattactataatggtaaagaaatagtattgccagataagtttttaccagaaaaagaatttattgaatatcataatgatgttatttttcaaggagcgtgggataaagtttcagtttatcgacatgaaggaaaaaggcatgagcaagggcgaatttaatcctgtcgctcaggtgaatggcggtcttgacaatatgattaactgggatggcaaagataaggatttgctggcacttataaagtacatagcagatgaggacaagctggataaagtgcttgaaaatccgcaggtgattaagacaccggtggtcagaaacggcaggcagtcaacaatcgggtaccggccggatgtatggaagacatggaaataacactaaaggaaatgaaaggcaggaaattatatatgtattatgtaccggatggcacagagcagtgcggttattatgagtgtaaagagtgtggaagcaggtttttggatttaaaaattgtaccaacattggtatgtccatactgtggagaagaggcagatatggagataggacctgatgaggagatgccaaaggttgtagaatctgcgaagcttattcagatggttagaggtgctgaagaggtagagaagatggataagctgttatcgcttgctgtgacaggtggcgattttagctggatataagaatgcagatatatgtagatgcagatgtaaagtagctgccagtggatgtgacattgattgagaagattggagaggcattatatgaaaccaaggacagcaaagagtatggagctatatgatatattgctcaggcgcgggtatccggagccattttgcgatgagataacgaaaaacctaaataccgactggacagctcaaaggatgataggatatctgtcacactataaaaagcttcccatggaagaaatcgctgatgaaatgattgcgatactcagcgatcgcaatcgcataatgcaaaagcatgagcttgaggagacaaatgcaagatggaatgactacttaaacagataaagtcaggaggattcacatgagagtactgaatatcgaagatgatacatttaaacacaatgatatatgcaaagccctgtcaggatgtgggattaaagatgtcgaatggtccaataatctcgcgaatgggtggaaacagattaaaaactcaatagatagtaataatccgtatgatctgataattactgatatgtattatcccgatgagccgggtggcagagaggaacaatcaggagatgttctgattgacagagtgattaagaacaaaatcacaatacctgtaattctctgctccagcgtgaacctcaaatacccggaaatatatggctgtgtttattatagcagggaaagaaactgggaggcagatatgcagaagcttgtaaatagtcttgtggcaggataatactaataaatctctaagtatttattttcatgatgtacctacgtcagatgattataaagtttgcaaagtaataggttactttttaaatatattttttgaaagcgaaataaagctctgtgcataagtggaaaggtatgaatttttgcggtatgcaattactaaatcattttgtagagtgggattccctacagagaatacttccacaggccagaatggagcagcatatcgcacatatccctctgaggcaatggttacaccaaggttctgtgatgcaagctgtatgcaggtttgattatttcttgtacggtacggaacaggtggctgtattccatactggtcaaacagtctttgggcggaacgtccggtattctgatccggaaaatgtaatataaagggagtgtcagcgaacaggcttaagtcaagccatgggtagcggcactctttttttgttactgctttttgggcaagaggatgtccgacgggcagtactaataatatttcttcatggcacagcagctcataatttagtttgggatgctcctgccagttgcttaaaatggcaaaatccagattggtatcggatatcagcttgtcctgtatcgaatggccatattcgaaaaaattaatgcagacacctgggtgtttttcgttaaaagcaggcagcagctgtggtataaggctggtgctgcgcattggcggaagcgcaatattcagctcgccattatagtaagagcgcatatctgaaagctcttttttccagtcctgatcgagtgccagtactcttcttgcataatccagataacgctggcccaaaaaagtaagatcatactggtatccatttcgtctaaagacttttccaccgagttctttttcaagcttgtgcagatatttagttaatgttggctgagaaacatagagtgcctctgcagcacgtgtgagattatgatgttcagctatcgctataaaatattcaaggtcagtatattccatgacagatcccccgtatatgtaattacataaatctaaaactatgccataaaggtatagaattaatgaaaacaatgaattagacacatgatatgttttatattactattaaattgtcgaaagggcaagggaaaggtgatgtatatggggaaatatttagagaatgtatttcgactgtcacaatatggtacgaatataaaaactgagatgatcgcaggaattacaacatttgttacgatggcatatgttcttgcaacagttccgaatatgcttggcagtgcaggattaaataaaagtgccgtaatgacagcggttatactgttgatagtcattaccacatgtgcaatggccttttatacaaacagaccgtttgcactggcacctgggcttggaagtacaggaatagtggtatccatgataacaaatgaaggcatttcgccggagaaagcggcaggagtgatattcctaagtggaatactttttattgcaatctcttttctgggactgcgagaggctgtagtaaaagtgataccggtcagccttaagcatgcggtaagtgcgggaatagggctgttcatagctctgctgggggcaaaaagctgtggacttatagctgccagcgagaaaaagaattgtcttacatttggtgatttaaggtcaccggaagttattctttgtctgataggattttgcctgatgctcttggtaaagataaagaatataccgggaggcattattttatctatacttattacaacgatagccggaattgcgcttggtgtgaccagactgccggataggataatttcatttccgggaaaaatggatgatatatttttgaacatcgatataaagggtgcattgaatacagcatatattccatttttgatagcactgttcataccggatttcttctctacatttggcacggtgctgggcgtaggggcaaaagcaggatatctggatgaaaagggaaatctgccgggaattgagaaatgttttcaggtggatgcagtgtcaacgagtgtaggcgcattgtttggaataccgagcatgactacataccttgagtcatcagcaggtgttgaggcaggcggaaaaacagggcttaccgttatatttacaggaatatgctttctgctcatgctatttttttcaccgattgtgctgatgataccgacagcggcaacagcacctgtgcttatatatattggaatacatatgcttggtgcgatgaaaaatattgattactctgatatgacagagtatatgccggcatttttatgtattggctttactatatttgcaaacaacatagcaaatgggatctgtatagcaatcccggtgtatgtacttatgaagctgatttcaggaaaaataaaagagatacagcctgttatgtacatagtgtcagctatttgtattttatactttataacgttgatataaaggcatatgaggtaccgcatataccaaatttatatcagaaaatcatacatgtagaaaaggagaattacatgagtaaacgaccaattataattgacaccgatccgggcatagatgatgcccttgcgattgcgatagcattattttcagaggaactggatgttaagctgatcaccactgtagccggaaatgtttcgttggatcaggtgacagaaaatgcgcttaagcttttaaaattttatgaaaaggatgtaccggtagcgaaaggctgtgcacagccgcttctggcggagtttgtggatgcttcggatatccatggcaaaagtggaatggagggatatgatttcccggagccgaaaacagagcttttattacaggaacatgccgtaaacgcgatgcgaagagtgataatggaaagcgatgagcctataactatagtgccgatagctgccatgacaaatatagcattgttatttgccctttatcctgaggtaaaatcaaatatcagagaaatcgtcatgatgggcggttcagtcaccagaggaaataaaggtgttatgtcagagtttaacgtggcaacagatccggaggccgctgcaatggtatttaattcaggtgctccgattgtaatggccggacttgatgttggctggaaagcgcttgttatgccgcaggatagtgaagaaatcaaaaagatgggaaaagtcggagatatggcatatcatcttttcaaacactacagaggcggcagctttaatacaggacttaaaatgtatgacagctgtgcaatcgcatacctgctttgccccaagctttatacagttgaggaaacctacgtaggagttgaacttaatggcactatgactacgggatgtaccgtggttgacctgaagggttatcttaaaaagaaaccgaatgctaaagtgtgtactgatattgacggtgaaaaattcagagaatggttcaagcagtcaatttcaagatgtatataaattatatttaaggaggaaggactatgactacatttgtcatgtatgccgcagccattatatctgtggcgatagtaatttttatgcttatcaaaaagatggatatcaagataacgctctttttgatgggaattgtacttatgtttgtgggatgcgcactgggaaatccgcttggaggtgaggattttgtatcgacaggatcggtgtttttagatcctttaaaggtaatcgcagatcagtttaagagcaccatatcatcatcaggatttatcatactgatacttggcggttactcagcatatatgagtgccataaatgcaaacagcgtaacagtaaacgtgcttacaaagccgatagcaaaaatcaaatcagtatatatactggtaccgatcgtatttttactcggaaacctgctttcacttgttataccaagtgcatcaaaccttgcagttatcctgctcgcaacactatatccaatccttataaaggctggaatgagctcacttacagcggcaggtattattgctacaacagctactattgtgcctacaccactcggaagtgataatgtagcgattgcagcggagcttgcgaatacaacagaatttgcaggacttacagcaacagattatgtattcaaatatcatgcaatagtatcaatacctacactgcttatcatggcagcaatccatttcttctggcagaaaaaatgtgataaaaaagcaggtgtgatcgaggctaaggcagtagagagcaaagatgttgaggaaattaaaggcggggcattgtacaagacagtatatgcaattttaccattacttcctattattttgctgatcggttcatttgctgtacagaagattacaggagcacagattgatataagcgtggaagtagcaacattattctcatttatcgtagcaatcatctgtgagatcatcagaaaacgtaatgctggtgagactcttaaagagacagaggcattcttcaagggaatgggcggctcaatgccgatagttgctctccttgttgcaggaacagtatttgttacaggattaaaatcaatcggacttatcacagcattacagagtgccatgacaggtctttcaggcggaggacttggatttgtacttccactcatactggttgcgcttacagcacttatcgtacttttaagtggaagtggtacagcattattcttcgcaatggttccgcttatggtgccgcttgcggcagcagcaggaatttcagcgcttgcggtatctattccaatgggacttgccggaaaccttctccgtgcggtttcaccggtatcggcggtagtaatgattgtggcaggaagtgtaaaacgcgagccgcttgaagtagtaaaaagaacttctgtaccaatgattgcaggaacagtggtaatgtttgtactttctatggtaatattcctgtaggaaagtatatgattatttaaaagaaatatatattatttggagggctgcagacgtgaaagcattaaattatggatcgttaaatattgattttgtatacaatgtagagcattttgtgagaagtggagaaaccatatcctcacagaacatggcaatatttgcgggaggaaaaggacttaaccagtctgtagcccttgccaaaagtggcatagacacatggcatgcaggtaatatcggcgaggatggagagtttctggcagagatactgcaaaaagcgggagcacatacagatttcatcagccgtctgccgggccgaaatggccatgctatcatacaaaaacagccaaatggtcagaattgcatactgctgtacggtggttcaaacaggcagaacacaaggacacaggtggatgaagtattatcccattttgaaaaaggcgattatctgattctgcaaaatgagataaacgagatcgcatatatcatggagcgagcgcatgagaagggcatgataatagtgctcaatccgtcaccgatggatgaaaaaatttttacatatccgcttgagtatgtagactatttccttcttaatgagattgaagctaaggatttaacaggatttgatgtctgcacggaaaaagaagggattgaaactgatgcacttctggacgcagtatgcagccattttccaaacagcaaagttgtgttgactttaggagaatacggctcaatctataaagatgaaaaacaaaaaatccaccagccgatagtgaaggtaccggtgattgatactacagcagcaggagatacatttaccggatttttcatcggaagtatcgcaaaaggactttcaccgaaggaggcaatgcagatagcagcaaaagcatcggctatagcagtttcaagacagggagcagcaccatctatacctgaattgaatgaggtgtatgattttggccgataatgactatggtattatgtggagcacgaaagaccttgagtttataatgaactcaaggtcttttttctgcattataagcaatgaatttataaaaaatataaaaatctgtatgaagttggactactaaatacagtagatatggtgtaaaatgattcctatagtaaagtcaggacattatcaaatgcaatagaactatgggaatataagggaatgtatataacaattatacgatataaattttaaaagaagagggaatatcattatggcaaaaaaggttactataaaagatatagctgatatggcaggggtttcaattgcaaccgtttctcatgttataaacagaacaagatatgtgagcccggaccttgttgaaaaaatagaaaatattattatagaaaccggatatcataaaaaaatagaagaaaaagaaagacgactcaaggttggaaggcagtcggaaatagttgcagttattccaaatgttgaaagcacgatttatcgtgatatggtgggatatttaaaaaaatatgttagcattcagggttatcagttttatattgcaattacggataatgatattaaagaagaggctcaggtactggaaggactgatacagaataaaaaaacagcaggtattatacatgtaccagtcagtgatgttgcggcagattataaaaagctgatcgaatctggaattccatttgtctgcatggaaagaaatattttgggagatggtatagacgctgttgaatttcgagatagagaagccattttcaagggaactgattatctgttagaatgtggtcataagaatattttgtttttaagagaaagcttgaagagtacgacgagagatgaaagaacacgaggctttctccttgcattagaagaacatggaatcaatacaaatgatgcaaatatttcagacattaatatcgaatccggagctgataactgtattttggaaatacaaaaggcaatgagacgatatatgccaactgcaattatggcaggaggaaatagaattactttatatcttatgaaaactatgagggatagaggaattgaatgtcctgaagagatatcggttgttggatttggtgatgagggatggtcggagttaacgtatccaccattgacgattttgaagagagatgttgaagggctgagcagacgagcagtaaatatgctttttgaaaagataaatacaggacatgtgattgaacaggattattatgccgatgtagagttgataataagaaaatccacaagaatgttggataatggaccttttggagaagaagcagctacaccggaatcaatagtcataacaaaagaggaaaagagccgtttgcgtgccggaaatttccgtgtggcaatttcatttcattatacaggaacatcatgggcggaattacacgaaaagggaatccgcgatgaattggaacaatacggaattgatattatatcagtaacagatgcacattttgatgcatctttgcaaaatgcacagcttgaaggtattcgtttacagaaaccggatgctgtaattgcaattccggctgatgataaagaaacaaaagaacaattccgtgaattggcaaaggtgtcaaagcttgtattcctgagtaatgtccctgagaatatggaaaaaaatagttatgtttgctgtgtgtctgttaatgagattgaaaatggagttaatgtcggcagaatgatgggggagtactgtaaaggaaaacacgtggaagccggatttatcatacatggagcggtcttttatggtacgcgtgccagagatgaggcagcagaaaaaattatttcagaacaatacaaaaatatagatattaaggcaataagaggttttggagaaattgaaaatgcatatcaggtttgtaaagatatgattactgagaatccacaaattaaagtcttgtatgtcagctgggatagaccggcactgttggtaattaaggcgttgaaagagatgcatagagaagacatcgctatatttacaactgatttagattataaaattgcacaatatatggaaagtggtattgtaaagggattaagtactcaaagaccttacgagcagggaagaacagctgcgcatgtggtagcgaaatctttattaagtaatgatgtgccaaaatatgttggggtgcagccgtatgttgtggatgctaagcagctaggaagagcatggaaggatatttttcatgagggaatgcctgaagaaatgaaataatgccggataaaattaaatatctaaaaagaaatatatgtgaagaaaaagaatatcatttggatattcttttttaattgctaaaaatttacgtaaaaaatatttttgaaatgttaatttgcgcaaaacacaatcgtataattgttgaaaacgacgaattagacaggattttacgtaaaaatattgacaaataatagagcaaaatatatcatgtaatcacagaaacaaataaaaacaaataaatttacgtaaatttaaaaaatggaggaaaaaactatggcaaaaataaaaaaattattagcgttgggtttatgcttatgcatggcagcaggtattacggtaggatgtggcgatagtaagtcatcaaataatggtacagattctggtaagaatacaaatgatggattatcgtttgcattttgtactaataccttaaacaatacatttcaaagctcaattgattcaaagctaaaagaactgtgtgacaaagatggaatatcatatacatgtttagatcctgactatgatttgaataagcagcttagccagttatcagatgtagcaaataatggatatgacgcagtatttgttattcctgttgattcagcaggaataacatcgggactggcagaaataagcgaagcaggtattcctatatttaatgtagacactgcagttatagatgatgaccttgagagctttgtaacacaatttgttggaactaatgcgtatatggcaggccagcttgttggagaacagatggttaaggatcatccggatggaggaaatattgcaattttggatttcccttcaaatgaaagctgtgttgatcgtgtaaatggatttcttgatggacttggagacagcaaagataagtttaagatagtagcccagcaggatggtggagcagccttagacaaatcgatggagctggcagaagacattattacagcatctcctgatatggatgcatttttctgtatcaatgatccatctgcacttggtgctgcagctgctattaaagcagcaaataaaacaggcaaaattggtgtatatagtattgatgcctcaccggatggaaaacaggcattactggatggtgaatttacagctgttgcatgtcaggtacctgtacagattgcagattattcttttaaggaagctgtaaagtatgttaatggagatactaaaattgatgagaaaaaggtatatctcgattcgcatttagtgtctaaggatgaggctgagaaaactcttaaagaatggcaataataagggagagttattatgggacagacagtattagaaatgacagggataaagaaaagctttgcgggtatttacgctttaaatggaattgacttttctttggaactgggcgaagtacatgcactgcttggtgagaatggagcaggaaagtcaacattaattaaagtgcttggcggaatttatcagccggattgtggattgataaaagttaatggaaaagaagtaaaaattgatggagtcccagcagcaagagcaaatggaataggtattatacaccaggaaatagtattggtgccttacctgacagttgcacaaaatctgtttttgggaagagaaattagaactagacttggaaccttggatgaagcggagatgaaccgcagggcagcagatatgatctctgccctgggggtcaatataaaagctgaaacagtagttgagaagctgactatcgcacaacaacaaatggtagagattgtaaaagctgtatcatttaacggaaaaataattgttatggatgaacctacatcatctctttcaaacgaagaggtggagcagctatttggaattattgagaatctaaggaagaaaaaagtaagtattatttatatttctcatagaatggaagagttattccgaatatcagatcgaattactgttatcagagacggaacatatgtaggaaccaaaaaaactgtcgagacgaatgcgaatgaattggtagcaatgatggttggaagagatcttgataatttctatgtaagagattattgcgatgtggaacatgctccaattgcacttgaagtaaaaaatctatcacaccagggaacattcgaagatatcagcttttcggtgcataaaggcgagatacttggatttgcagggctggtaggtgctggaagaagtgagattatggaagctgttttcggagcaagaccatatgatgccggtcagattttcctgagtggagatgaagtgcattttaaaaatcctatgcaggcaattaaatcaggaatcgcattggttcctgaggacagaaaaaaacaggggcttgtactgggaaacagcgttgcattcaatttaactttatcgagtctgcgtttttgtatgaatggaattgctgtcagtgaaaaaaagcgtgattcgattattgaacattatagtaaaagacttaggattaaagcagcttctccggagattgaagcaggtagtctttcgggtggaaatcaacagaaggttgtacttggaaaatggcttgcaacaaagccggatgtcttgattctggatgagcctacaagaggcgtagatgtaaatgccaagtatgaaatatatacagtaataaatgaactggcaaaggaaggcattgcaattattatggtttcaagtgaattgccggagattatcaacatgtgtgataacgtttgtgttataagagcaggtaagcttgttggaaagctcggaaaagaccagatgaatcaggaagaaattatgaagtatgctgcaggaggcgtagagtaatatgagtgagaagaaaagagaagtaaatgcatttggaaaaagaaatccattcacttcaattataaaaggcaatataggaattattgcagtattgattattatgtgcgtaatagtgtcaattgcaacggataaattccttacaaccaataatataatttctgttttaagacaaatttcaataaatacatatatcgcactgggaatgacactcgtaattatactgggacacattgatttgtcggttggttcaattgttgcgatgtcgggaacccttacggttggacttactgtaaatcagggaatgccacttatagtagcaataattattggattggcagtaggaactcttgctggatttatcagtggatttatagtatctcattttaaggtacctgcatttattattacaatggcaatgatgaatattgcaagtggtattgcatatgtgtatacaggtggacagtctacacgtattacagataagatgtttatagctataggtacaggatatttgtttaatgtaattccgcttccggtagtatatatggtaattttgattgcaatattcagtttccttttaagcaaaactaaatttggaacttatgtatatgcaattggaggaaatagggaagctgcaagattatctggcgttcctattaaaaaaatagaaattattgtatttacgctttcaggtgcgcttgcagccttcgcaggacttgttctttgctcaagaatgtattcaggacagccatcagtaggaagtggctatgaattggatgcaattgccgcatgtgtacttggtggaacatcaatgaccggaggaaagggccggataagtggaactgtatttggtgcgatggtaattggaattatttccaatggattaaatctgataggagtttcatcttattggcagctaattattaagggtctgattattgcatgtgcagttctgctggattgtcagaaggataaaatagcgttgttaaaaaataaggtaagggctgcaaaataaattggaaaggaaatctgttcgttttttacaatacagagaaagataagcaaatggaaatttttcgtaaaatgtctttcgcggattctacgggagatgcaattccgttttatcacgaaggaaaatatcatattttttcacttacatctccaccgggaacgaccgtctatccggagagactgcgcacaacctggagccatagtatatcggatgacttagtgcattggcaggagcttccgacggcattatatccgggagaaggagatgaaccggatgcttcaggagtgtggaccggttcagtaatatatggtgagggacaatatcatgcattttatacaggatattgtctaacagcggagtttcagcagaccatatgtcacgcaacaagcgatgatggaataacgtggacaaaagatatcgcaaatccggttattactccgatgacagagctttatgaaaaacttgattggagagatccgtatgttttttataatgaagaagatgaaaattattggattttgatttcagcgagaagacttgatatgccggttacacgaaggggctgtatagtgctgtaccgttcaaagaacttaaaggattggacgtattatggaccaatatattcaccggggcatacaaattgtccggaatgtccggaaatgtacaagatgggaggtcactggtatttgtcttactcaagattttcagagtttgtaaatacaatataccgtgtatcagagtctccttttggtccgtggagaaaacctaaaaaggatggtattggtggaagacgcttttatgctgctaagtcaatgcaaaatgatgatggaagacgtttttattttggatgggcgcatgatcgtgcagagcagagtgacaaaggtgaatggtattggggtggaacattttgtattccacatgaggtggtgccaaccgaaaatggagagttaaatgtaaagttaccatgtgaatatgagcatatatttgataaagctgttaattggaaatatatatcagttcttggaaatgcaaaagattatggtgaaaaaactataacattgaatgcgctggaaagctgttcatatggatttttgagacacacggaagaaagctatatgctgacatgcaaaatagtgccaagagaaacatatgatacgtttggtattcttttaaagtctgataaagaggcaagtggatgtttattccttgaatttgacaaagcgatgcaaagggtctcatttttaaatcttccgatgggagtggatccattttgggtacagtcgtgtcaggcggttccgccggcaaccgagcctgggccggatggggtgcgtgtctgtgagaaaacaatgcaaattgaagacggaaaggcaatagacgtaaagattattgtggatcatgacatgatagaggcatttattgatgaacagatagcgttcacatatagaatatatgccaaaccggaatttgaaactggtataattgctcaggattcgaatgttgaattctataatttaagcatttccggaaaataattgcgaatgggagagacatggatggaaaaagaatatgatatagttgcgatgggagaattattaattgattttacaccggcaggagtttcagaaaccggcatgtgtctttatgaacgtaatccgggaggggcaccggtaaatatgcttactgcagcagctaaagcaggattgagaacagcctttataggcaaggttggaaacgacatgcatggtaaattcttaatagaagctgttgaaaatcaaaatattaatagcgatggaattatattggatgataatgtatttactacacttgcatttgtaaatcttacaaaagatggagaaagatcatttgcgtttgcaaggaaacccggagcagatacaatgatagggtacaaggaagtcgatactcaaatattacagaatacaaaagtttttcatgtgggttcactctctcttactgatgaacctgcacgttccactacattccaggcagtgaaatgtgcaaaaaatgcaggtgcagttatatcatatgaccctaactacagggcacctctttggaatgatgagaagactgctatagaacgtatgcgttcaatgcttccgtttgcagatatgattaaattgtccgatgaagaaactgctttacttacgccatacgaaaatccggatgaagcagcaaactatttattagaccatggaataaaaatagttgcagtgacactcggaaaagaaggggtgttaatatgtaataggaaggatcatcaaaaggtaagtggtttttcaagtcaggtagtagacactacaggggcaggagattcattttggggcggatttatgtctcaatttgtaaaaagcaaacttaaccctgaagattgttctatggaagaattaaaaaaatttgcaaggtatggaaatgcagtagcaagcctgtgcatagaaaaaaaaggaggaatattgtcaattcctgaagaaaaggaaacttttaaacgtttacagctaagtgtgtgaaaaacaatcgtagtgcaaaataattgaaattatacgattatagcctagctatcaattttaataaacatagtaatgaaaaatgcaacatttctctaagaaatgttgcattttttttcttacagttactatatcggacatcaattctaatactttacccctaattacattaaattttaaaaatttatttgcactttattggacataatcgcttgctgcgactttcatatttttgaaaattcccttattttataaattcatatgctccaaaatgcaacatttcttagagaattgttacatttcacataagcatggaaatagcttaaatcaaatgcacggaggtatacagaatgcttaaattatcgcttaaagagggagaatatgtaaacatcggagacaacatcagagtggtctatgccggaggaagcggaaagaacggacgtctcatgatagatgctccaagagagatgaacatctctaggtcaaacaacgacccgaatcctgagaagagaaaggatacatattatccggagccgaggatttcagaggaagcacagcatgaaatcaagaagattatctggaatgaaagacagaagaaggcaaagtcggataaagcagataataaagcataagtagacaagttaataggcggctgtggcgcaagccacacccgggaagccgcttgttatagaaaaccgcaactgcttaaataaaaatatacacaaagcagctgcaaaaccatcgggaaaaggatttccagaggtcaaacataataacccatgaatatgggacaaggaggattatattatggtagtacaacacaacatgcaggcagcaaatgccaacagaatgctcaacgtaacaacaagcgcacagtcaaagagcacagagaagctttcatcaggttacagaattaaccgtgcagctgatgatgcagcaggacttacaatatctgagaagatgagaaagcagattcgtggtcttgaccaggcatctacaaacgcagaggacggtgtttcatctgtacagacagcagagggtgctcttacagaggttcactcaatgcttcagcgtatgaacgagcttgcaacacaggcagccaatggtacaaactcaaaggattcagaccgtcaggctatccaggacgagattgaccagctcacaacagagattgatcgtgtatctgagacaacaaagttcaatgagacatatctgttaaagggtgaggctggaacaaagacaataaacatgaaggctcatgacgctggtcttaagggaactcttacagataacggtgatggatcagctacatttaaaatggctgatcttaatacaggagacaaggtaagtattggtggaaaaacctatacaataggtggagaagctgcagatactgctaaaatgattgatgatgcaaaaactgcattaggaacaggtacaggtaaagcatcaattaaaataggtggaaatgaattccagattgataaagctggaaaagtatatgataaggatggggctgctctttatgtagaaagtgcaaaagatgcaacacaggcagctacatttgatccggctacatcaacatttactacaacaaaaacatttacgtcaacaggtactggtactcctagtatcataaataacgaattatcattagataatttaaaagctcttgcagctgtagctggaaaaacaacaactgtaaattctaaatcagttactgttatgacagatgctaaaaatgcagcaggaggagctggaactgatggtgttgatgataatgattcaacaattattaccaaaaaccatgcatatgagttggcctctaaagagcttttggctgccaaccagattggagatacaaagggttctgcaaaggtagagaatgctggagcacaagcagatggttctttcaagattactacaggtcaggcagaagttgccaacagcttatcattcagccttcacgtaggtgctgatgcagatatgactaacaagattcaggttaacattgatgctatggattctgcaagtcttggaattaagggacttaatgtaaaggatgcttccggaaacgctgcaacatacgcagtagatgctatttcagatgctatctcaaaggtatcttcacagcgttcttcactcggtgcagttcagaaccgtcttgagcacacaatcaacaaccttgacaacgtagttgagaatactacaacagctgagtctcgtatccgtgatacagatatggctgaagagatggttaactacagcaagaacaacattcttgctcaggctggacagtctatgcttgcacaggctaatcagtcaaaccagggtgtactttcactcttacagtaatcatctacaatttaaagttgtacaaagcaagaagagctcgaaagagctctttttgttgtgcacttctttctcttagcatgaaaagtacgattatttattcccgaataaattgcagacaccccctgtgaagtagtataataacaacaattaataaagctaattgcacaaactggaattgacaataagcatgaaaagaggtttacactatggacgtaagaaaaatgagaaacgaattactgggaaagcgccttgtagctgcgcttgagtcgcgcaacatggaggcatattatgtagagacaaaggaagaggctgttaagaaggcactggagctgattccaaagggcagctcaatcaatatgggcggtgccacatcggtgaaggagtgtggtctgtatgaggcgctctcaaacggagattatcagttttatgacagggacaaggtgtctacacaggaggagaagcaggagatagcgctaaaggcatttacatcggattatttccttggaagtgtcaatgcgatgagcgaggatggcgtatttatcaatattgacggaaatgcaaaccgcgtggctgcatatgcttacggaccaaaacatgtgcttcttatagtaggcatgaacaaggtcgtaaagaccgaggcagacgctatgagccgtgcgagaaatgaggcagcgcctatcaacgcacagcgctttggcatcgacacaccatgctccaagaatggcacctgctttgactgcaagagtccgcagtgtatctgctgtcagattctgactacacgcttttcaagggtgaagggacgtttccagattattcttgtggacgagaatctgggcttttaatatgtgaatagccggaaattcgggaaatttttatgcattatacgaaaaggaaatatacgaaatgggatatttaattagtgagacaacaaaagaggaacgcgaggcaattgtggctgagtcgcttggcaatatcgaggctacctgcgatggctgcatgtcggggcttgccgagatgtatcaggactatattgacggaaagaaggagcttcgtgagataaatatggagttcaatgccaggtatgtgcacggagaggatatgccggggagaagcggctgtgggtataagtaatgtgaagcggcttgggataattaccgaagcttaatgatatcagggagacgcagatgatttcatgcagggatgttaacaatttacaaatggacggaatggagcttgtggcgggagcagcagggcttgacaggatagtgtcatggacttatctggtgcagacaaagccttataaggatcatatgaatccgggcaactttgcgctgcttgtggtagattacaagaggttttccatggacgaggcatatgacgccatggttgagctgaacgagctgggtatatcaggctttgcgatttcggttgtggaggacatggaagagacaccacagaggatgaaggacaaggctgatgaactcaagctgccgttgttttatatccggtgggagggagctacttttgtagatattgcgcagagcgtcggagagctgcttttagagaccagtgtggataataaaaggaccggggactacctgtacaacctgctttttggatatgaggtaaatgataagtatatcgagaagatttctgcacagtttggtctgacctttgaccggccgtacagagtgggaatcatcgtgatagaccgcaaatacggagtgaatctggagcaggacgagcacacatatacatactataccgactgcctgaaccgcgaggttatccatatgaagaaaaagcctatgtatatgaggtttttaaataaatttgtgcttctttttgaggagacaaaggatatggagacagagcatcagattgaaaggatacttggggacttagacagtcgtgcatcatttgcagggctcattcacagcacatgcatactcggtgctgcatacagaaagcctgcggattttggcaagagctatcaggaggcgaaaaatctcatccccaaaaaggatattttacccaatccgaccaacaagaaggtaatcagtgcaagctccatgggcatatacaagtatatgttcaacagcggcaatcagcaggaaatcatggattattgcaacgagaagctaaagcggcttgagatgtatgacaatgcaaacggctcgtttctcatagatacgctgctcaattattatatgtgtggctttaatgtccaaaaaacggcacagatgatgtacgttcatcgtaattccctgcaataccgtctgaaaaagatagaagaaatactggaaatcagccttgatgactcgatggaatatctggatgtagttaactgtattcttgtaaaaaggcttatgtttaattagttactgtaaaaatgcacaaacaaattgtgcaaaattaacattgcaaagctacttcattgagtttattatacgaactaagcaaaggcgctggagaaaaactccggcgccttttcgtatttcaataatcaaggaggaaaagcttatgatgaagagaagtaagagatttgcagcattgatattgacaggtgtaatggcagcgacaacattgtttggatgtggttcgtcatcaggaggagctgcctcagatagctcagtggcagacagctcatcaaagaaggttttaaaggtcggtatggaatgtgcatatgctccattcaactggacacaggatacagataccacaccggacggcagcaaggcagtcaagatagcaggctctgattactatgcatatggctatgatgtagcagtggcacagaagcttgcagaccagatgggaatggaccttgaggtacataaggttgagtggtcatcaatcggtatctcactcgatgcaggagattatgactgtatcatcgccggtatgggcaagactaaggaaagagaagcgtcatacgcattcacagagccttattactatagaaacaactgtattgttgttaaaaagggcggcaagtattcaactgtaaagggtctttcagatctcgcagatacaggctgcaaagtaacgacacagcttggaacaggctggattccacttttagaccagataaagggtgctgagcagtcaggaaactttgagactacatcagagtgcttcctcgcaatatcaaacggcagcgcagatgtatgtgtaatcgatgttccgacagcagagtcagcagcactgacaaatgatgatttacagattatcgagctggatgagaatgatacattcacaggtgatgatgaaatggtaaatgtatgtatcgcaacaagaaaggatgatacagcactcagagataaaatccaggatgccatgaatgcaatcggctggaatgacaaggcaaagatggatgagctgatggatcaggttctgacacagcagccggcagccaactagttgttagagatttatctgattcacgaaaagatgaaggactgtgggatgatgttatatcgcatcatcccacaatagtctgataaaccggcgtaagctggggattagagagataaaagtgaggtagcagtatgatgataagtaatccaagtaattcgttagaatggatggtatttctggcgcagaaatattcaagcatgtttatcaaaggaacctggcttacgctgtacatatcggtagttggtacattgcttggcttcgtattgggatatatcgtaggcatagtaaatgatgtaaagcttaacgatggcgacaacatcgtaaaaaaggtccttatccgtatagtaaaggtgatatttacagtttatgttgaggtattcagggacacaccaatgatagttcaggcgatgattgtatactatggaatacgtcagatgggctatgaaaacctgacacctgtatttgcaggtattctcgtaactgtattaaatacaggtgcctacatgggagagacagtcagagcaggaatcggttcaatagatatgggacagcgcgagggcgcatgggccatgggaatgtcaccgtttaagacaatgctctatgtagttttgccgcaggcattcaagaacatcattcctgagatggcaaatacatttcttttaaatctgaagatgacatcagtgctcaatgttatcgctgtgcaggagcttttcatggctgccaagacagtcggtggaaactactacaagtactttgagtcatatctggtcatcgcggtaatttactttgtactttgctttgtatttgataagctcttcaagctgattgaaaagaagctgcagggcaagacagactatgcactagcagttgagtacatggacaatgaataggaggcacaatatgagtgagacagtaatttcaattaaggatttaagcaaatcatttggtgatcatgaggtacttagaaagattgatattgatgtgcattccggcgaggtcatctgtattgtgggctcctcaggctcgggaaaatcaacactgcttaggtgcatcaacaagcttgagaaacagacctcaggaaagattttatatcacgataaagaggtcagaaatgtacaaaaggatatcaatgattaccgttcaaaggtgggaatggtgttccagtccttcaatttgttcaacaatatgacagtgctccagaactgtatgctttgtacaagaagggtgcttcatctgccaaagcaggaggcctttgacagggcaatcacgcatctgaaggcagtcggcatggctccttatatcaatgcaaagccatcgcagctctcaggaggacaaaagcaacgagttgccattgcaaggtcactctgtatgaacccggaggtgcttttatttgatgagccaacctcagcgcttgacccggagatggtcggagaggtgctaaatgtcatgaaggacctcgcgaggacaggacttacgatgataatcgtcacacatgagatggcatttgccagagatgtttctacaagaactattttcatggactcaggatatgtggcagaggatgcagcaccgtcagagctgtttacaaatcctaagaatccaaggacaagagaattcttaagcagatatctggcaggctagatatggttggcattcagaaggaggaaatgataaatggataattttgtagtaacctttgccagaggatttggaacaggcggaaaagcaatagcatcacagctggcaaaagagcttggaatacattgttatgagaaccgtattctgactcttgcaagccagctgagcggacttgacgagaatgtgtttcaggaggtaaatgagaagctgcgtgaagagggcggatttacgagttttttgcgagggcttccaagagcaaagggatatatatcaagaaatgagaagttcaaatcagatgacaggctctttgagtatcagagccagattatcaaggagcttgcagacaaggaatcctgcgtcatagtaggaaagtgtgccgactatgtattaaagaaccgcccaaatgtggtgagcatatatattgaggcaccgcgtgcattctgtgtggagcgtaccatagccaatatgggtgtgacaccggaggtggcaaatgccacgattgagagaacagataagttcagggcagattattacaaatactatacacacggaaactactggaccaatccggtgaactacgacctgacactaaacagtgagcgtgtcggtgtggaaaactgtgtgaagacgatagagcagtatctgatcataaagggctttatcaaggctgatatgattaagccggtgggagaactcatataaaaagtatataacaaaaaattgcagctcgtgtatcgagctgcaaatttttttattattatatagatatgtctatccaagcaaagccttatcagaagcaaattcctcgccggaaacctcctcaaatttcatgagcagatcctccacagtgaggtttttcttttcctcgcctgagatattaaggacaacctgtccgttattcatcatgatgagtctgttgccgtgagcgatggcatcacgcatgttgtgtgtgaccatcatggctgtcaggctgttctccttgatgattttgtctgtgagagtgagcacctttgcggctgtcttagggtcgagagctgcggtgtgctcatccaaaagcagcaccttcggcttctggagtgaagccatgagcagtgtaacagcctgacgctgtccacctgagagcagaccaacctttgaggtcattcgatcctcgagtcccaggtcaagctcctttaaaagctcgtggaaacgctccttttcagcctttgtgatgccccagccaagaccacggcgctttccacggcgtgctgcaagtgcgaggttttcatcaatctgcatggttgcggtagttcctgtcattggatcctggaacacacgtcccagaaatgatgcacgcttgaactcaggaagtcctgtgacatccactccatcgatgagaattgaaccatcgtccacaggccatgtgcctgcaacagcattgagcatggtagattttccggcaccgtttccaccgataacagtgacgaaatcgccctcctcaagctttaggtttacaccattaagggcatgcttttcattgattgtgcccggattgaaggttttatgtacgtttctaatctctagcatttatttgccctcctttgcgttaagtgctgcagcagagcgtttgccggcctttttgaaggaggccttgctcttgcccttcaggtaaggcactgcaaggaaaattgccacgatgattgcagtgaagagctttaagtcatcacttggcatctgcagccacagaacaattccgattacaatgtagtaaacaattccaccaaatatgacaaaaataagttttcccatgaaattcatgtgctttccgaggattgcatcgccgagcacctcaccgatgataactgcggcaagaccgatgacgattccaccacggcccatgtttacatcggaaaagcctgagtactgtgaaagcaggccgcctgaaagcgctacaattgcatttgaaagcgcaagaccgatgagcttcatgttgtcgatgttgataccctgagccttgctcattgcagggttgcagcctgtggcacggatagcagagccctgctctgttccgaaataccagtaaagcaccgcgataattacaaccgagaaaatcacaccgacaattatcgcatgtgtcagattacgtgatgaaagcaccagattatatttatctgcgctaagtgcctggttggcgtgacgctgcatgatatttaagttgatagagtagagagctatctgtgtaaggattcctgccagaatcggaggaatgccgagctttgtatgtaagagacctgtgcagagtcctgcgagcagaccggcaatacatgcgcaaagcagtgaaacccagatattgtagccgttaatcgtcatcataacggttacggcaccacctgttgcaaatgagccatcaaccgtcagatcggcgaagtccagcagtctgaaggtgatataaacaccgagtgccatgataccccaaatcagaccctgggctatattgcccggaagggcattggtgaatgcaaccggatttaaggttgcaaaataattcattagaatcattttattaaatacctccatagtgcagctgtttatttagctgagatttcctcatagccgtccggaactgtgattccaagctccttggcgcggtccggaaggtactccttagtgaacttaggagcgctcttaacttccatagttttgacgtctgtaccatttacaaggatatcgtaagccatctcacctgttgtgtatccaaggtcatagtagctgatagaaagtgttgccacaccacagcccttagcgattccttcctcgccagcgaagataggttttttagcctgtgaagctacattgttgatagcctctgtacatgaagcagcagtattgtcagttgggatgtagattgcatcagatgcatcacatgcgctctgtgttactgcagcgacatcatttgaatcagagaatgtgtactcttttacagtgtatccctcgtcctcaaggtatttggtaatagttgttgactggtagatgctgtttggctcagatgagcagtagatgataccgatgttctttgcatccgggaagagctccttgatgcatttggcctgctcatcgagtggagcgaggtctgtagtacctgaaatattctttcctgtagtgcctgaccagtctgacatatcaagagctgtagcgtagtctgtgatagatgttccgagaatcggaatagagtctgtggctgctgaagcggcctgaagagctgctgtagcatttccaaggataaggtcatagtcgttggtgacgaacttggtgcagattgtagagcatgtagaagcatctcctgcggcattctgctcgtcaaaggagacatcgtctccgagcttgtcctttaatgcgtccttaaagccctttgtagcggcatcgagagcctcgtgctgtacgagctggcagatacctacctgatatttggcatctgagttcttacctgactgtgtgccaccgtttgctgaaccggaatctccgcatccggcaagtccaagaaccattgttccggcaagaacaagtgaagctaaaattttagatctctttttcatgataattcctccttttgtcagcgctttaaagcgttgatgtatcaattaggtaaattatattaacttattaatgagaagtcaagggaagatgaggaaaaagtagggcttaatatatataaatgatggataataggctataattgaaaataaacatagcatcaacaaaacagtaaaggaagaaaatactttgataaatatagcgatatgtgatgatgatttagtctttgcgacaaaaatagaagcaatgcttttacagatttctaaaaagcagatgataaaaatgaatatagaagttttttctgacggaagtgagttatgggacgatatagcattcgggaaaaataaatatgagctgttatatctggatattgaaatggtcaggattaatggtatagaagttgcgcgaaaaatcagggaaaatgatgcggatgcaattttgatatacatttcctcatatgacaattattttattgagttgtttgaagtagagccatttaggtttataaaaaaaccggtggatgattatatttttgaagtgtattttaataaagcctacgagcggatacttaaggatgaaacatattttgaatatcgttttaataaagcggattataagataccgataaataacatctcatattttgaaagctcaggaagacttatcaatataatacatatggacggaaaagataaattttatggaaagcttaattatgttgagaaacaattaggcgatagtaaaattccgtttctgagaattcaccagtcatatctggtaaattacagatttatatgtaagataagcttctctcatgttactttgcgtgatggtacggttttacagatcagtgaagaccggcaaaaaaagatcagggaacaatataataatctgcttgtgggagattttttagatgaatgaaatattattttatttgatttcaacaagtttatttttggtgataataaaagaggcaatggggatattctttgtaaaaaaagatttgcctttttcattttcattgattgtttggatagtatttttagcggtggatatttgcgggactgagtatattgcacagccatttttgcttcttatattagaaatcgctacaagcctgtttttttgtatactgctttattatggaagcataattaaaaaaatagtatgcgtagtaattatcaatttactggggatgatatcagaggttgttgttggtctggtatttatttttttagatataagatatacacaatatcagatagctggttcactcatatcaaaactcgtattgcttaccatattaagagtgttgaaagcattgaaacacagcagcttgaagaggaaaattccattttcatattggtgtatgttgttttctatacctatgggaagtatttttattttgaatactctttttatgctttgcgaaagatcagatgataaaaatgctgctgttttttgtctgatttcatcaggaataatcttagtgttaaattttatgatatttaagatatatgaggaattggcggagaagctggagttaaagaaacaacaggcaatttttgataaagaaatagaattgtgtaaagagcaacttcaggaacgggaagtggtaaatttaaatatcagaaagctcaagcatgacattgaaaatcatttaatgtgtataagagagtacgcggtgcgaaaagagtttgaaggtgcaatagactatattgatgacatattaaatggagagaattatctgaaaaataattcagaaattaataccggaaatatagtagttgatactcttttaaattacaaaaaatctgttatggagaaatcagacataaagctgaatttacgtattgaaattccacagaaacttagatttaatgatgcggatatttgtgtgatacttggcaattgtcttgataattcaattgaagcagtctgcaaacttgatgatgttagtaaaagagaggttaatgtagatctggtatacagaaagaaaggcctgcttatcaggatttctaatccgttttcaggagacataaaaaaggatactaatggaaatccggtcacaacaaaagcagataaagaaaatcatggaatgggcttatgctctgtaaaaaatgctgttagtaaatataatggtgcaatgaatatttcaacggataatagtatgtttaaggtacagatattactatattaagggaaaaaatacatctaaaaccgtattttttacatggagaagagagatggtcataatatcaactatatttattatatgatgaataaaaaagtaattattataaccattgtagtactggcgattttgggaagtgtgatatttttttataaacagaatgcagaaaatagcaaaaaatatactcagaactcgatagagagtgaggttgtgttagcgagttctaaggagggctataattcggtagtggtatatcagcttaataatgcactaattgtaagtgcagaatcggaagcagcattttttgatggagtacggtatgaggtagaaacacaaggtaatgtggattcaagtgatatagatattgtatggacgaatataggtggtggtacagaaaaaaccgaggataacgatctgattatagcagaaataaaaatatcagaaaatggtaaattaatatccgatactaaaattaattttgcgaaaaaggcatttgatgcgcttgaggatgttcttaaaagcaataagagataaataatatcaatttaagattttggcgaagcagtaatgtatgccctttggagggctaaaattaaaccaccacttgaagtggagtttgcgaacttagaattatctcaacattaataagaagggagaatttcatgctgaagaacaaatatatccagaaaattttagttagtttgtgtgtggttatatgtattgctgcaatcagttgtgttatgtattttaaaagtaatattaaagatagtccggatgtaaataataaggtcgttgctgagaccgagcaaaatcagacagaaaaacttaaggatatatctatcaatattgcagatcattatattacgaatacgggtgatccgggaaatctgtacaccatagatgaaaataacgttttgtggggctgtggaaacaacgactggggacagcttgcacagggaacgcgtgactatgatgtacataatgaaaaggtaaagctcgcagaaaatgttgtgcatgtagattattccagagaaggttttgcgatttatcttacaaaggataataagctatatgcatttggacatgcaggaaaaggtactgaggaattcagtaagagatatggctatgataagacagcgaagctttttgataataattattatgtggatacaccatgtcttatcatggaagatgtgagatatgcaaggtgcggtaagtttgacattattgctatcaaaaatgatggttctgtatggacctggggtactacatatgagagcatgacatttgagaattatgcggtgtcatttataaagaagccggaaaaaatccttgataatgcggttttggtaacaggtggtacatttcatgcggcactgttaaatgatggaacagtatggacctggggatacaatccggctgacaactgtggaatagcagacagtcttgtcgtaaagacaccgactaaggtcgcatctgatgcaataatggtatggacaggcagattacaatataattcggacaagtacagtcttgccgggtttgatggggaatatcctgccgaaatgatgaataccgtaatagaaaaaaatgatggttcatactggatttgtggagagggtgttggcacagaacaaaaaatggtttcgggagaaacagagtatacagttatatgtagcagtaaatttgtgccatatgaatttcctgcaaatgaattttcaaaataaaatatggctgaatgtaaaaatccccggtagtaactaccggggattctatgtctattcagctacaaccttggcaaatttctttttaccacgtctgataatgagaccctcgcccttgaaatcgttgagagtgtattttgtagagatatcagttaccttctcatctgcaacggaaacaccgccctgctggatatttctgcggccgtctcctcttgaatcgcaaagtcctgcttttacgagaacagagatgatatcaagctctccgtcagggaagtcctcagctgtaacggtaactgtaggcatatttgcattgttggctccgcctgcgaaaagtgcatggcttgcctctttagcctttgcggcttcctcttcaccatgaacaagctttgtaagctcgaatgccaggatttctttagcttcattgagctgtgcgccctcccagctttccatcttgtcaatctcttcgagaggaaggaaggtgagcattctgatacatttaagaacatcggcatcagaaacgtttctccagtactggaagaactcgaaaggtgttgtcttgttaggatcaagccatactgcacctgactgtgtcttgcccatcttcttgccctcagagtttaggagcagattgattgtcatagcatatgcatcttttccaagcttacgtctgatgagctctgttccaccgagcatgttgctccactggtcatctccaccgaactccatgttgcagccgtatttctggaaaagtgtgtagaaatcgtagctctgcatgatcatgtagttaaactcaaggaaggaaagacccttttccatacgctgcttgtagcactcagctgtaagcatacggtttactgagaaatgagcaccaacctcgcggagcacatccacgtagtttaagtccatcagccagtcagcgttgtttaccatgatagcctttccctcgccaaagtcgatgaagcggctcatctgtttcttgaagcactctacgttgtggttgatagtctctgttgtcatcatctggcgcatatctgtacgtcctgatggatcaccaatctgtgcggtacctccaccgataagcacgataggcttgtttccggccatctgaagtcttttcataaggcaaagagccatgaaatgtccaacgtgaaggctgtctgctgtaggatcaaagccgatgtagaaggtagcctttccgttgtttataagctctttgatttctttttcgtctgttacctgcgcgataagaccgcgggcaactaattcgtcataaattgtcatgattttcctcctgataagatgaatctgtattctgaaaaataaaatatccccctcatccatttaaggacgagggggatttctcgcgttaccaccttaatttgcatcctgctcgcacaggaatgcctccgtgagttgtcacacattattcgacatatattatatagtgaaaatagccgattctgctaacactccggcactataacgtgtgccaatacgttgcggcttattaatcgaaccggcgatatttaaccatccggtatgacgttcggtgcaaagctccgggatgtattccagatctgtttccttgcgcctctcacctgccggcagctctctgtaagtattgcagaaatgtacttgttcccatcaaagcctgttgaaatgtaattgtgcttcaattgacgatattatagctgtttaagaaggggtttgtcaagggtgcaaaaagcggtgattcctttaacggtatatacaggtcggaagaactattgcaaaaaagtataaaaaagtataaaataaaagaaaaagtataaagatttataaaaaactataaagagcaatagaaagtataaaaaaatataaatagttttgaatttcatataataaattgaggtgaatttatgcagaatccatttactacaaccttcagtaagactccggaatacacatatatccatacagagaaaacagaggagatactggaaaactttatttacgataatccgtcggagtcggtatataagataaccggtgtcagaggctccggtaaaaccgttatacttgcaaaggtggaggaagaattaagaaccaatgaaagcagatatataaactggcttgtttttgatgtaaatcctgcaagagatatactgggacagatagcggcaatgcttgtaaaggccggttttggttcacaggataagaaaacaacagggataaacctctctgcaacagtgatgggaacaggtggtggaatcggctatacggcagaaaacaataataatttctttgatatcggtgtagaagttgagacaatgatacaggctgcacagaaaaaggggaagaagatacttataggaatagatgaggtttcaaagtccgaagagatgataaaatttgcgtctgaatatggcagatggctcagagcagggtatccggtttattttgtgtgtacaggcttgtatgaaaatatacaggaattgagcaatgtcaaaaatcttacatttttcagaagagcggcaacagttaaaacggagcctcttaatatgatacgaatgactgaaatgtataagagtaagctggatattgacagtaatgaggctcgtgaaatggcgaaaatcacgaaaggatacgcatatgcatttcaggaattgggcgtgttgtattttaagaagaaagaggatgagtcactggaagatattttaccaggactcaaggctgaattgtttgcatattcttatgaaaaaatatgggaagagatgactgaaatggacaggtttcttgcaggacttttgacagaaaaggaagaatacaagcgtgaagaggtgcttaagcttatgggagaaaagtcaggaagctattctatgtacagagatcgtcttataaaaagaggtatattgaataccagacagggctatatctcgcttgcgcttccatattttggtgaatatataaaggagtattgttagaatcttaaaatgagtgaattatacaagctccaaaagctttttaattattgcactctgacctgtggtgatgtatactttgaataacaaacaaactttggttatgaaagggagaaaaaatgagcacatattatactattatgagtatgattgacggctttaagtcgtttatcaatctggcagttatggtactgacaattattgcatcatggattatgtatgcaaaggcaggagagcacggctgggcggccatcgtaccgttttacagctcatatgtaaaattcaggattgcagggaaacagaagctgttctggggatatcttgtggcaagtatcgcaagtatagcaggatgtattttattgatgtatgagattattgcctcaggactttccgttatgacatccagttatatggggtcgtattatgattctacctatggatatgccggaaaccgcatcggggctcacatgggcatgctgatatttgcggttattctgattattgcagcaatgattgcggcattggttatgaatatcctctgctgtgtcggactggcacatgcgtttggcaagggagcaggatttgcctgcggacttatattcctgaatgtgatttttatctgtattattgccttcaacaaaaacattgtttatgtgggagctggatacaatagtaataataactactataatccatacggttcaaacggatatggtcagcagtatggtcagaacatgtacggaaacggagcaaaccagcagtacggtcagaacatgtacggaaacggagcaaaccagcagtacggccagaacatgtacggaaacggggcaaatcagcagtatggccagaacatgtacggaaatggcacaaatcagcagtacggccagaacatgtacggaaacggagcaaaccagcagtatggtcagaatccgtatggcacagcacagggcggggatgctcaaaattcctacggtacatcacaacagcagtcatggaatgatgagtataacaacaaagattacgaataaataataagaataaagcacatgaataaaaactataaataaatgttatagtacaaatttgtatcattctcttgacatatagtgtcagagggctataatacaaaacaagatttaaataaatatgttcaccaaaattcgttgatgagaacaaggtccgatttgtatttattttcagagagcctgtgggcggtgcgaacaggcaatgatcagattggaatatcctctctaagaagcgggctgaaagcattaagtgtgtctgtaaacctcgccggtgtccaccgttatatggaaagcatatgctggtatgcagagtgtcacagtaatacactgtggaatcagggtggtaacgcggattatttcgtcccttttcagattatgtcaatctggaaagggattttttaattccataaaagagttttagtgagcagaaaaatgttaaggaggcttacaatgaaagcattacaaaaagtaagtaaatttttatcagactacacatcgatagttgtcatagcaatcgccgtagtcacatttctggttccgaatctgatggcctgggtaaatcagatgctgtttgtggatccggtatccaacaagttcacatgtcagtcaatcattatcggaatcatcatgtttagtatgggacttacacttacgacacaggatttcaagatacttgcacagagaccatttgatatatgtgtaggtgcaatcgcacagtatcttatcatgccgtttctcgcatttggtatctcaaaggcattgaatctgcctgacggaatcgcacttggacttatcctcgtaggctgctgtcccggtggtgtttcttcaaacattatgtcatacctctgcggtggtgatgtggcattctcagttggaatgacaacagtttccacattgctctcaccatttatgacaccgcttctggtatcatttcttgcaagcggaacacatgtctcaatcaaggcgcttccgatgtttgtgtcaatcattgagactgtaatctttcctgtagcggttggatttttactcaactacctgcttggaaagaaaaaggcatttgccgaggctcagaaggtcatgccgggtattgcggtgcttggcctggcattcgttgtaggtggtgttgtatcatcacagggctcaaagttctttacatcaggagtagtaatttttgcggcagttctgttacataacggacttggatatctgctcggatacggtgcaggaaagctggtaggcatgaacacagccaagaagagaaccatctctatcgaggttggtatgcagaatgcaggtcttgccacaaaccttgccaccactacagcacagtttgcttcaacacctgaatcagccatcatctgtgcagtgtcatgtacatggcattcaatctcaggcacactgcttgccggagcctttgcattaaaggacaaaatggctgctaaaaaggcagaagaagccgctgagacaaagacagcataaagagaatgaatacctattataaccgattggtaaattaaacaaaaattatagaaattaaaaataaattatgtataaaatatttattgaaatttgctaaaaaaagagtaaacataatatataaataaaattaagataaacaaaagaaagaggtaataatatgagtggaatcttaatgatggtaatagccattgttgtgctcggtggagcatacttattatatggccgttatctgcaaaacaaatggggcattgatccaaatgccaagactcctgcctacgagatggaggacggagtggactatgtaccagccgataccaatgtagtattcggacatcagtttgcatctatagcaggtgcaggcccaatcaacggaccaattcaggcagctattttcggatggcttccggttctgctttggatattaattggtggtgtattctttggagctgttcaggactttgcatctatgtacgcttcagttaagaacaagggtcgtacaatcggttacatcatcgaggagtacatcggtaaattaggaaagaaattattcctgttattctgctggctgttctgtatacttgttgttgcagctttcgcagatgtcgtagccggaaccttcaatggctttgctgctgataaagcaggcgaggttacaaaggttgtagccaacggagcagttgcaactacatcaatgcttttcatcatagaagcagttgcacttggtttcttccttaaatactctaagttcaacaaatggattaacacacttgttgcaatcgtattacttatagtagctatagcactgggactcaatttcccaatgtatttaaaccttagcgtatggcacataattatatttgcatatatacttatagccagtgttacacctgtatgggcactgcttcagccacgtgattaccttaacagctacctgttaatcttcatgatcgtaggtgcgataatcggtgtatttgttgcaaatcctgcttgtaaccttgatgctttcacagcatttgcaatccctgatgcaaacggaaacccacagtatctgttcccaatcttattcgtaacaatcgcctgtggtgcagtttcaggtttccattcacttgtatcatcaggtactgcatctaagcagataaagaatgagaagaacatgcttcctgtttcattcggtgccatgcttatggagagtatgcttgcaatccttgcacttatcgcagtagcatcattcggtaagggagaggcagcagctcagggacttacaacacagccacagattttcgcaggagctatcgcaaacttcctgtcagtactcggtttaccacactcacttgtgttcacactgattaaccttgctgtatcagccttcgctctgacatcacttgattcagtagccagagtcggacgtctgtcattccaggagttctggcttgattcagacacagatgatgacaatatgagtccatttgtcaagctgatgacaaacaaatactttgcaacaatcatcacactggtacttgcattcctgcttacaaaggtaggctatgcagagatatggccactgtttggttcagctaaccagctcttatcagtacttgcacttgttgcctgcgcagtattcttaaagaagacaaagcgtcagggctgcatgctctggattccaatggtattcatgatggcagttacatttactgcacttggcatgacaatctacaagcttacaaaggcattattctctgtaggacttgaccttggaaattcattacagcttatatttgcagtattactgctcatccttggtgtacttgttgcaattcagggtgtgaagaagctctgtgagaaatcagaaagcaagaaagctgcagcttaaaatgagatagaagttgcaattaatagaaatcaaaagtctcagaatccgcttaataagcgagttctgggacttttttatgtgaggatgatgaataaaagaagtgaaaagggagcctgatatcaggctcccaattctctgtcctttcccatgaaaaatactgctaaagattccggaccaacatggcttccggtgcagaaatcataggtggtatttatcacatcgcgcacctttatgcgctttttaatctgttcaatcacatagagcgaatcctcatatgcgtcagcatgtgccactccgataatctgattttcagggtctgtaatgttgtcgcataacagattgacaagctcatttaatacggcttttcggccacgacattttctgaactgtacaatatatccgtctttgctgccccttaggataggcttgatacttagcatgttgccaaccaaagcggtggttccgcttaatctgccggttcttgcaatatactttagattgcccacggtaaacacaccgtttaatctggcaggataggtctctatcgtgtcagccacctcatcaaagctcatgcccttctcacgcatttcgctggcatatattgcgagaagtccctgtccgagggaagcatttaatgaatccaccaggcgtatttttctgccgttactgcaatcatcaaggacagcatcggctgcgacacgggctgagttgtagttgccgcttatgtttttgctgagggagaaatacaggacatccttgtcggcctctatgatttccctgaaggtatcctcaaagattccgctgctgatgagtccggtctttacctcagcaccttctcttatcgcatcatagtattccttaccctttgcccgctcctgttccggtgtgaggtcaggctcaaagcaggtcatttcctttccgttgacaaggtttacaaatgatagcaccttgattttatattttttacatagctctgcaggaatgtttgccgcagagtcaacaattatttcaaacatatttaccctcgtatttctataataatgatatgatggtcaaaaggtattctgcccctttaatcataataattggttaactgtagttatgcatcacatacattacaattatatgccattaatatatgtggttgcagagaatagtatatgtagttcttaatactatgtcaatggtttttgctatgtttagtaaaaatttagaatatttagatagagttatcagggatgtagtgttatagtagaaataatagatatatagattcaatgaaacagaggaaaaatatgagtgatataaaattaggctgtcacgtaggcatggcaggaaaagatatgtttctggcatcagccagggaagcagcatcatacggcgcgaatgtgtttatgctctacaccggggcaccacagaacacgagaagaaaggaaatctttgagctcaacatagacgcaggctgggaatatgcacatgagcatgggataaatgagatagtggtccacgcgccatacatcataaatctggcaaacaccgtaaagcctgagacatacgagctggcagtggagtttctggaaaaggagatagtaaggaccgcggcaatgaagagccgcatactggtgcttcatccgggaagtcatgtaaatgccggtgagcaggctggaatcgcacagattgtaaagggacttaacacagtgctcaatcagaatgatgacgatgtgtttatcgcacttgagacgatggcaggaaagggcagtgaaataggccgttcctttgaggagcttaaggcaatctatgatggagtggacaggaaggaaaggctgcgtgtctgctttgatacgtgccatgtaaatgatgcaggatacgatattgtgaaccattatgatgatgtttttgcggagtttgacagggtgataggacttgagcagatagcggtatttcatgtgaatgacagcttaaatcctctcggagcacacaaggacaggcatgcaaatataggcaagggaaccatcggctatgacacactgcaccgcctggtgcatgatgagacctttgcaaatgtaccaaagattctggaaacaccatggctttgtgaggagggctctgcgaagaagactattcctccttataaagatgaaattgaatggcttcttaaataagaaggtggctaaaaatgtatggagaggtttggtattacagacagtaagataatggaggcataatagatgaaggaaaaaacctacgagggaactaaaaaaacacagaatggtttaaagagaatgtttttttcagtgcttgcgatattattgcaggcagttttcatggtatatatgtttacaaggctaaatgaatatgcggcagcaataaacacgaccacaagcgtcctggcaatcatacttgtgctcggactgtacaatcgtgagcagaccgcatccatgactacaccgtggattatactgatactggcatttccgataatgggagtgtcactttacctgttagtcggactaaacggcgcaccgaataagatgcgtgcacggtttgaagaggtggattccatgcttcttccatgtctgcctgaaaacgcagacatactatccgatatgtatgaaaaggtgccgcaggcagcgggaatttcaacatacctggcaaaaaatgcattatatccggtatatcagaacacggatgtaacatattatgatcaggcatcaaagggactcgaagcgcagcttagcgatttatcaaaggctaagaaatttattttcatggagtatcacgccatagaggacaaggaatcgtggcaccgtatccagaaggtactcacggagcgcgtgcaggcaggagtcgaggtaagggtgttttatgatgatatgggctcaatctttttcatagacagggatttctcggaaaagatggagaagcttggcatcaaatgcagggtgttcaacccggttgcacctgcctttaacatgtttttaaacaatcgtgaccatagaaaaatcacggtaattgatggaaaaatcgcatataccggcggctataatctggcaaatgagtacttcaacgtgacacacccatacggaatctggaaggatacgggaatcaggctcgagggagatgctgtcaagtcgtttaccatcgcatttctcgagatgtggaatgcatcagagcgcaaggtgccgcgcgaggtggatgtatcgcaatatctgctgcactatgattatgaggcaaaacagagtggatttatccagccatatgcagacagccctctagataacgagcaggtgggggaggatgtctatataagcatggcaaacaaggcacagcgttattgctggtttatcactccttaccttatcattaccgatgagatgagccatgcgctgacacttgccgccaagcgtggagttgacgtgcgcatcatcacgccgggcatacctgataagaaaccaatatacagcgtgacacgctccttctacaaccagcttgtgaagcatggtgtgaggatttttgagtggacaccgggcttttgccatgcaaagatgagtgtggcagacgatataatggcaacctgcggtaccataaatcttgactacagaagcctttatcaccattttgaaaatggctgttttatggcggattgtgaagtggtgcatgaaatcagagatgattttatcaggcttttcactgagtcagcggaggtgacggagaagtacaggaccggaagaagtgcaagacgaaggctggggcagtcaattatgcggctgtttgcagggctattgtagacggaaagtggattaaaatacaagtaattgaaggtaaaaaatcacataactgcacttgaacagttaataaactaagttttatttaggaagtgagagcatatgagtgattacgacagcaaaatcatcagaaagcagataagagtgtacggctcggtgcagggagtaggtttccgctacagaacagagcatgcggctgaaagcgttggcgcaacaggctgggtgagaaatgaccctgacggctcggtatttatggaaatacagggcacagaggagcagatagacagggtatttgcaatggtgagtcagggtacttatgtaaatatagagaaaatggatgccaaatcaataccggtggttgaggatgagaggggatttcatacgagagaatcgcttggagacttctggggactatggcacagataaacggaggcatcatatatgttttttatgatgggaataacggacggcaggaaggactttgacttcaatcaggtcattacctgcgatgaatgtggcaggtatggcaggtatcaggtgtatatgacatacatggtgctgtcactgttcttcattccgtgttttaaatggaacaggcactactatgtgcagaccacatgctgtaatgcactttacgagcttgatccggaaataggacgcaggatagcaagaggcgaggacgtggagatattgccacagcatttgcagcgtgtaaacccgcagtatggttatggctttgaaaatggaagtggaaacacaacaaaaagatgcagcaattgtggatatacaactacagaggactttgaattctgccccaaatgcggcaggaaattgtaaatttaggaggaaaatacatggaaacctggtattacgaggtagtttccatagacggagactatgcaaatttaaagagatgcgatatcgaatcagatgatctgaagcttgtggcaagggcactgctcccaccggaaatcatggagggaagcagactgaaatacgagctgatgcaatatgagataatttagtaacatataaccttgaagtaggagatgttaagaatgcagcagaaatcgacacaaaaaatactgctatttagtgtagcagcacaaaaagtggaaaaaataaaagtcctgtgcaaaactcttggaatatcggtgcaacaggtggaaaaatcagattacggacagaagctcggtgcgatagcaggaataaccggattcaaaaaggatggttcaaggtatagcggagccgattttccggcggagcttctggtcttttcaggcattaattcgtcacaaatggacatttttctggcggaatataagaaggaggggatcgaaccaatcggatgtaaggctgtcgtgacaccggataatgtattttggagtgccgataagctgtttcgggagatattcagagagcacttgtttatgagcaggtaaattgtaaacgttattattaaatgaaagaaaatgttaagaataacgtcatgcacatgcaagcatagggtatcagcttttgggcttggatagttgctaaaaagattatgtgaaagtgagttaggctagtggggatgaaaacatcgtactctccttttcgtgtttatttacttttttaagaatcaaattaaataaaaatatatagaattttatttataatcagtgagcttttttgcgtataattactttaattttttctatataatgaagaagctcagcggaaatca

SEQ ID NO: 657 - DNA, 699209 bp, Agathobacter rectalis
  source 1..699209: mol_type = genomic DNA
acaatacattttatatgattaaatcatcatatagaggtgggaagttatcttatcggaataaaatagtggtaacattatttttttcgataatggcatcagtggttgaaactttgggaatgacaatatggtctgttttttggaataaaatagatcaatggaatacatcaattctcttaaataacgctttcttacattcaccttatagtattactttatttgagatgataattggagtagtaattatgagggcaattggtttttttgtattatctagtgtatttatttttgtttctttattttttaaaagtaatattgtgccgatagcgattaatacatttattggtctgggaggtatagcaattaattatattttatcaggaaaatattttgctttatccggtggcacaatcagagaagctgaaaattatgatattcttagaaagtatacaccgtttccattgattagtgaaagtgtcaattattttaaggaatatgaacctatcaatttaatgggagttccaattcagttattaagttattctttaataattaatctggtttttgcaattatagtgatagcgctgggttactatttttataacacgaattttagggaaagttgagttcaaaaatatcatgctagagttaattgatataaaaaaaagatatggcagtaaagaagtattgcatggaatcagcatcaaatttgaaaatggtatttatggattgattggaccaaatggatctggtaaatctactattatgaatataatgtcagatgttttggatatgagttcaggcaaaattttatataatggaactgatataaaagaattagatgacagatatagggaaaaaattggttttttgccacaaaatgtaggttattatccaaatttcacagcaaaaaaaaccatagagtattttgggtatcttagaggtgtaaataaaaaagaattagattcaaacgtggaacaggtgttaagggatgttaatttgtatgagaatcgtaacgataaggttaaatctttttcaggaggaatgaagcaaagacttggaattgcaataacatgtgtagctaatccggagattattatttttgacgaaccgacagtgggacttgatccggaagaaagggcaagatttaaaaatctaattagaaaattatctaaaacaaaaactattgtattatcaacacatattttatcagacgtagaggaagtggctgactatataatattgattaaagaaggatgtctgacaaaatttgagaagattggtgggaaggataatgaataatgttaccaaaatggaattatacaaagttctttcaaaacctcaggtatatataatttttattgttggactaattattcaaagcatcatggcgggacagatgagaacaactatgtttaatggatatcataagtctgtgtatgaaaattatatgaatgaaatggaaggcgaatattcaattgaaaaaaaagaatatattaattcagaatatcagaaattccaagctattatggatgatgagcaaaagaatgaaattgcatttaataatggaaaaatagatggtaaggattatcattctataatcaacgaacaaaagaaagctcaatatagaatagcaactgtcaaatacattgttgagaaaacagagtattatgatagtctggataaaagtgcacaatatttttatgatattgaaataagtgattatgttgaaaatttgaggtttaatgttatacctataatagttattttattgattgtggtacctatgtatacagatgatatatatgcaggaacattagctatgattaaatcatctaaaaatggaagaatgatattgttaaaatcgcggctgaacattagtttattaatttcgttgttgatatgtatattatttgcatttattgaatttgtgacaaagtacattatatttgatttaggaaatctgaatgcaggggttgaaagtctgatgattgagaggactatgcatttaccatatattatatcggacttgtctatatggcaatttattgttttattatatctgttctatcttataatctcggttatgattagcataattggtttattagtttctaaaatatcacgaggaaatatagaagccttttcaataatgagcgttattattgtaggtgtttcatatattttaaatattttgtgactgatatgtaatgacttttcaataaagagactgaatatgccgtttgcagactttgaaagggcgatgcaaaaggcgggatacaagcttccggagcctgtataataaagtaaatgcactataaaaaggaaccagcaggacgatttggtggtaaaaattattcctcttcaataagtttaacaaaatcatctggcagaattatctttgttccacctgcctgataatcttttatatttcttgtgacaatataatccatatcttttctggatgccaccttttcaacaactgcatcctcatagtcactgattgcagatgcaagtgcatccatgcagtcatccgctgtaacctctaatattccagtcaatgaataaagctttcccattatcatctttgctgcttctatgttatgcaaatgtttccttataagataatagatgtctgttgctgaacttgcagtaatgtacatttcgattgtatgatttgctgccataagaaatatttcttctgcacttttattccatggctctcttgaagtcagggcatctattatcacatttgtatctgcaagaatcctcatctattttgcaccaagcctttcttcttttgcttcattcaggtctgcatcctttggtaagattccaaacagggattttgctacttctactctgtcctgatgtggatttgtcagttttgccactacctttccgttctttgtgataaaaacatcttcttttgcagataataataaatattttccaagattatttttcaattcagttgctgtaattgacatatcaccacttcctttcttcgtactattattatactcattttgtacgattttatcaatgcatttagctggaaaatattactcggtgtactagttgtatcctccacattatttgccattgacaaccctatggagtatgcccggttggtcttggataacgagatgcaggcttgggtggattaggaagatagtttagatatatggtaaatcaatcgcctattagtgagacaataattatttttacacaaaccagcttattcgtggtagaataaaaccacagataagctggttgtttgttttaaaagaatcttatgaaaaccaaacaaccggaactaaacaaaatcacagcactctacgagagattatcccgtgatgatgagcaaagcggtgacacaaagcaccggcggttatgaaaagaaggacaaaaacggtaatcctacaggaaagtacaccaatgcacaggacaattacacctgctccacttacagtaaagcaaagaacaaagtgaattggaattatcagtagatgctttggaaaatgaaatttaggaggaaaacacatggaaacatggtattacgaggtagtgtccatagacggagactatgcaaatctaaagagatgcgatattgaatcagacgatctgaagcttgtggcaagggcactgctcccaccggaaataatggagggaagcagactgaaatacgagctgatgcaatatgagataatttagtaactattcagaaccgctgagaaaaaaaactgatatagttacaaacataattgccttgaattaggagatattaagaatgcagcagaaatctacgcaaaaaatactgttatttagtgtagcagctcaaaaagtggaaaaaataaaagccctgtgcaaaactcttggaatatcggtgcagcaggtggaaaaatcagattacggacagaagctcggtgcgatagccggaataaccggattcaaaaaggatggttcaagatatagcggagcagattttccggcggagcttctggtcttttcaggtattaattcatcacaaatggatatttttctggcggaatataagaaggcaggtatcgaaccaatcggatgtaaggctgtcgtgacacctgataatgtattttggagtgccgataagctgtttcgggagatattcagagagcacttgtttatgagcaggtaaatgaaaaaaggaaccaacaggttcctttttatatgtttgcgcgccatgggcgcgctctaacgggtgcaagtcccgaacatgtccagatagtggaaagtgtatagctgaacagcaaggggagtcaaatcagcacgatataaatatttcaaactatgcagcagtttcccatataagaaataattctatgagacactggaaaacatccggaatctgcacccacagtttgaatgacaacaatcaacgaaccttgatatcctcacaaatgacctcttatcaatgcaacagggatagtctgcccttttttaggcagttctctggcagaatgaggtactatgagcggattcaagactatggtcctgtgttaaatagcaaaatcacagtgtcgtgaataattcaggataagtactagctggatgaacggaatgaaattataatagtagctatagtattaacgaatggaggaagaaatgtgtacaaaattctaatagtggaagacgatataaatattagtgaaatggtaacagattatctttcgggagaaggatatgaagttttaccagtttatacaggagaaagtgcaatctcagcattagaacaggagtcttatgatctggctttaattgatttaatgcttcctggatgcagtggttttgatgtagtgaaatcaatcagaaagaaaagtgtaatgcctgttattataataactgctaaggacaatgatatagacaaaaccagaggattaaatttgggagctgatgattatgtaacaaaacctttttctatcatagaacttgttgcgagaataaaggctaatatacgaagggctacaaagtatataaatgtctcacatgaggaggaaattattcaaattaaagatttgaaaatatatacagaccaacataaggttgaaagaggtggaaaaataataaatttaacgcatactgaatttgaaatattggtgttacttgcatcaaatccaggacgagccttttcgaaagaagaaatgtatttgaagatttggaatgaaccatattatggaaatgaacgtgtccttaattctcatatgaataggctgaggggaaaattaaatattgataatagtaataagatggattatattcaaactttatggggaattggttataaaatggagaaataagtatggaatatataagcactataattatggtttgcgtcattatatggggcgtaatgcaaaagcgaaaaatttatcaattagagaaagaacttaattctattaaggaacaaattgaatatagtatcaaatcaacacaaggtttaattttaacctcaactgaaagcgtacctattaaagaattagtaaaaagtattaataatttattgaatgcatattatagcggacaagttaattgtaagaagcagaaagagacaatgcaacaggttatgacaaatatatcacatgatttgagaacaccattgacagtactttccggttatatagaaatacttgaagagaaatcatcgaaaatagatatgccggaagaaattgttgtaataattcataaactttcaataaaaataaaaaacagtgtacgtttgattaatcagttttttaatttagcacaaattgaatcgggtgatattaaatacgacataaaaaaatataatatcacttcattatgtagagaaattgttttaggctattatgatttactctatacaaaagggtatgatgttgaaattaatattcctgaatacccgatctttgtccgaattgataagaaagctgctattagaattattaaaaatattattgataatgcaattaaatatggagacgatggaaagtatttaggtatcactgtagaagaaaaggaaaaagaagtttatgttttattcgaggatcatggtcagggaattgagaatattgaaattgaaaaaattttcaatagatcatatacattaagtgatacgaataaaaactatgaaagtagcggtttggggttagcaatatcaaaaaatctggcaaacggtatgaatagtgatattctggtaaaaagtattcctcataaacaaactgtttttaattggaagataaaaaagtgataaaaaagtgatatttaaaaaataaaaaagagaaaaacagagcttatacttattattagttcggaggcgaggcgatgaaagaatacaaaatagtgggagaacatctgacgaaacaatataaaaatcgtaaagttgttaacgatgtaagtatgcatgtggttaacggtgaaatctatggtttagtagggccaaatggggcaggaaagagtacaatgttgaaaatgttgcttaatcttacaaaaccagatatgggtgaatttacgattgatggagtatctgttcaaaaaaatggttatcagacattacgtaaggttggagcaattatagaaaatccgtatttttatgaacagttaacaggaagagaaaatttagaactgcattgtgaatatatgggatatcctaatttagaagaaatagataaagttttaggcttggtctcattaaaaaacattgatgggaaacatgtgtcgcaatattctatagggatgaaacaacggttagcaatagcacgtgcaatactgactcgtcctgaaattttaatattggatgaacctataaatggtttggatccggatgggattatagaaataagaagattaatacaagaacttaataaagaacatgggatcaccgttattatttccagccatattctttccgagatggaattgttagcagatactgttggaattatgaaagatggaaatatgatacaggaaatctctatgaaagacatccacgagcaaaatgcggcttatatagaaattgaaacagataatgcggaaaaagcaggatatatactggatgaaattttacaaattaagcaatttcgagttatatcagatggaatcattcaggtgtttgatttatcaaaaagtggaaaagagatcagcagtgctttgatgaaatatggtataggtgtggaaagtatccagaaaaaacagaacagcttagaagagttcttttttaaaaccacaaggaggagcttggcttgaaacatctaatgaaattagagataaaaaaatataagttaacaaaatatattaagggtatttttatagcaacagtatgtattattgcatttattactgtttctcttattgattcaatgacagatccaaaacagacaaaagatacatatgatagtattataagaatgcttaatttattagtaacaggtacatttgtgatattttcatcagtattaacagccaaatatattattggcgaatataaggatagaactattttgctgatgtttacctatcccataaaaagagaaaaaataattcttactaaattagctatggtatgttcctttacgggaatttctatcgcaattagttatgcgttatgtgttgtttatgtgacaatagcagaagcgatatttgatgtaactgcaagtactattacattagagcttataatttacgggattaaagaaatgattatttctgtgattttgggatctgttctatcacttttcccatatataataggaatgaccaaaaaatcagtttcgatacctattattattggaagtttagttgcatttatgcaaacacccattatgggaagaaatccagctctgacagatgcatttttgaaaattgcaattcttctaatcattgccttgttgggagtaaaattgacattaataaataaaataaatgaactggattgcagtgtgaattagattagtatttgctttttggcaaatttactaataaatatacatgagaaaaggaggtaggatagaatgtttaagcgcattaacagcaaagaaaacaaagagaatcgttggccttgtatcatctgcgatgaatggtcatgggatgtttttagctaagaaaaagagaagggtctgttcatcatagatggataggccccttctctataataattattatacgaggagaaatgataatgttaaatacagataaaatatatttttatccttataagatttttgaggttgagagaagaaaatatttatatactatttatgcaagtgggctttttgaaattgataataccgtatctaagttattacaattaaatggtagtacggttgaaagtataaaagaagcattaaagatagatcttacagaagataaatcaattgagcttttaactgatatggagaatgaaaaattactttgtagaaatgaagtaagtcatgatgagtctcaagagatagagaaagcaaatttttctgcattgacattgatgctggcacaagaatgcaatatgagatgctcttattgctatggagaaggaggcgagtataataataaaggtattatgacggaaaacgttgcctttcaagctatcgactacttggtaaaaaatagtactgatgagttattacatattgcattcttaggtggagagccactattaaattttccgttgttaaaaaaagttgttgaatactgcaaacagatttctgcagatactggtaaaaagttttcatatacaattactacaaatggaacgttaataactgataacatagaaaagtatttgacagaaaacaaaattgtctgtcaaataagtttggatggaacaaaagaaaaaaatgacatgaatcgattctttcgcaataagaagggttcctatgatgttattgtagagaaaactaaatctatgagacatatgaatttggtaactgctcgtgcgactgttacaccagataattctgattataaagaaatatttaaccatcttaacgaattagagtttcgcgctataccaatagctatagctcaaaacatggtagatgatgaacaatttgacaaaattttatctgaatacataaactatattttttatttcgaagagcttattttgacaaagcaatatgcaaaagcaaaaaaaatgacagatttggtaaatgctttagaaaaaatagaatttgggaatgttcgaaataatggatgcggtgcaggaagaacaatgtttgcggtagacattgatggaactctttatccttgccatcgctttgtgggggaaagaaaattcgcattgggtaatatttggacaggatcagacaacagtaaattcctcaagatgataaacgtaagaaatagagataaatgttctaagtgttgggcacaaaatttatgcttgggctgttgtccccatgaaaattatactaacacaaataatattaatttggcctcggaaagaagctgccggatggcaaaaacaatatatgaaaaattgatttctgtatatataaagatgtccgatgaggataagaaaatgatgtggccggaagattagcttgatttcgtaactacatagcaggtatttccgtcagttatgacttgggatttatattttttgatatattttcaagcatgttatgtttaggggaaaataggatgagaaaactaatgttattttgggcaactctcaccatatgaagtatttcaaaattttatctcaaaaaattagttgattgggatcatcaggtaatctaggctagtgcagaagaacagccactttacgccaccgtgtcgtaaagtggctgtttcctatgtagatgatcagtgtttcttaaaacggattactggccccgtttgaagtgctatactcaatgttagattactacaccaaaaggtgtgccacttgttaagttgattgaaccgccgtgtaccgaacggtacgcacggcggtgtgagaggtcgggaaaatttatttaattttccctcctactcgattgcaattttatattgttagctctaatcaaccagtcccttattcttccactttccgctcttccagcgtagcaccataccgacggccctgatgcactcatcacttgcgagtccgatgtaagcaccgactgcgagaagccccagatgaagtccgaagaagtatgttccaccgaccgccgcaaggtacatgaaaacagcacccatgacaaccgggaatacggcgtcaccgcttgtcttcagtgcctgaccatataccagattggtgactcttccaaactccagcacaatatcgatggcgagaagctttgtgacaagatttatcatctgtacatcattcgtgaagatccgcacaatgtagttacctaaaagcgcaaatgtgatagaaaggcaggatgccgtaatcacaccgtagatagcggccttgcgagtgcccctatcacattcgtcatactcctttgctccgatatgccagccggtcaggatggcatttgcctgagctaaggcagcaccgatacagtacgaaaagttagcaatctgtgtggcataagagcgcgcagtgacgttcagtccgtcagcatccatctggttcatgaatcgcactacaagagtcattgcgatattgtaaagcgcggtttcacaggcagacgggaagccaatctttataatctgtccgagaatttttccgggagctatgcgctcgggactgtcctttgccttgatgagcacagcgcccattgtggcaacaataatcagattgataatacgtgaaataaccgttgctgtggcaacacccatgacgccccagtccattacaaagagaaaaacagcgttaagtataaagttaatgacatttccaataattgatgcccaaagggattgctttgtgtagccgaaaactctcaggtagcttgaaaaaatcggtatgagagcatttaaaaagcaggcacctccaacaatgcgcagataagtatttgccgaatcaaagagcgccggtgcaatgctgaccattctaagaatatttccggaaaaaacagccagaaataccgacatgagcacacctattacagcgttaaatataagcccaagctgccttgcctgatatgctatacccggttttccggcaccgatattctgcgtcatgacagcaaccataccgcttgagatgacaccgaacatgatgatgaaaacggagatatatgtatttgccgtgccgacagcaccaaccgcctggtcgctcacggatgacagcataagagtgtcgaccatgcctgacagcatgtaaaaaagtgtttcgaagcatattggaatggaaagctgtgtaagtgtttttctttgaacctgcatatagattacctcatttataatgtatgtatacttttataatgtatgtatactttgtgatattaacagaaagaatgcaaacttctcattataaacttcatttgggagaggaagatataaagaagagaagcttgcatgcatcaatatattacattatcacaaataattcttgtattatttcaaggaaaaattgtactatttctactttatctataactgagtcattattcatattacagtgtagattcatcaaaaccttgagaacaaataaaaaattgcacaccttatgcatgtaatatgttaaaataaaaatagttgatatatcattattatagtaaacaaaccggatggggattaaaagagactaaggaatatgtagaaaaatgtattttgaattaaaagaaaaccggccacacggcacaccggaaaatccgttcagccaataccatatcagtgatgtaaagcgtgcattccagattccggtacactggcacgatgagctggaaattatatatgtaaagcagggcaagctgcatgtgaccatatcaggtgaaaactatataggaagcccaaaggatgcatttgtggtatctccgggcagtctgcatttaatgggctcgccgacaggagatgcagattattacacgtttctgtttcctcttgaatatatatcatttcagacggacgatctcatggaaaaatcaatcctatcccctctcaaacgaggcagacttatgattagtcctcagataaatgatacagcagcagatatatgtgagcggctgatagagataaatgcaccgatatcagggaaaaacgcagaaaaaacagatgctgcaaatatagaggcgcaatttgagacaaaaataactctcatcaaattcatccggaaaatgtggagaaatggtctgattctggaaaatggcacaaatggcaccaacacaacagaaaaagaaatgataacgtatatccggcaaaactatacaagggaaatttcactgaaggaatttggtgcacagtttcatttgtcagaaaaatacatatcacgctactttaaagagcattttcatattactttgtcacagtatgtcaatcatctcaggctggagcacgccagacagctattggaggaatcagcagcttccgttacagaggttgcgatgtgcagtggatatcagaatgtgagctattttatacgcagcttcaagaaaatgtatggggtatcacctcttaaatacagaaattttcaaactttaccttgacaaagtgacaaaaagagcataaagtatattaaaagattaatttaacagtgtttcaaaaccgatgagaaagaagagtagacctttccggatatctcagagagctgcagatggtgggattgcagtatggatggatttgttgaatggcctttcgagggtgatccgaagcgtttgattgtacagagcatggtttcttaacgattaaatcagtaggcgtcaccgggaaccgaacccgttatcatttcggcatgtatattagtacatgacagagtggacaattcgtcaaattgagtggtaccgcgataataagaatttattaccgtctcaagcattagcttgaggcggttttttgcataaacacccacatgatgaaatatcgttagcgcaaatttgatttgaggctatgacatttggcttgttgcggcagatttatgagaaaatcgcgaacatcgggaaacaaacacttcacaaagaaagtgaggaattcaatatgaaaaagaaagtattatcagtaattttagcagcagtttgcaccatgggtcttatggcaggctgtggagcagagggctcaaagggctctacacagagtggcgcaaagggtgacagctacacagtaggtatttcgcagtttgcagagcatggctctcttgacaactgcagggagggcttcttagagggcctcaaggaagagggcatcgaggaaggtaaaaaccttaaggttgattaccagaatgcacagacagataccggtacagcaagcactattgcagacagcttcgtatctgagaaggttgatatgatttgtgccatctctacaccatgtgcagccagcgcctacaattcagctatgaatgcagacattccaacagtatacacagcagtttcagatcctgttgtagcaggtcttgcaaaggaggacggctcaagtgtcggaaacatcacaggctcatcagacgtgcttcctgttgaggagcagcttaagatgatcagggagatgatgccggaagcaaagaaaatcggtattctctacaccacaagtgaggcaaactcatgcagcaccattgaggagtacaaggagcttgcagataaatacgattttgaaatcgttgacaccggaataaacacatcagcagatattgagattgcagcatcagatcttgtttccaaggttgactgcctgtgcaacctcacagacaacacagtagtaaatgcactccagactgttctcgacaaggcaaatggagcaaagattccggtattcggaagtgaaattgagcaggttaaatcaggctgtgtcgcttcaatgggaatcgattactaccagcttggaatcgagacaggaaagatggcagcaaagattttaaagggtgaggagaaagcctctgacactccgtttatcacagcttcaaaggcagagctttatgtaaacactgcagcagcagacaagattggtatgacacttgatgcagattatatcaaggatgcagccgagacatttgataagattgaagtaaaatagttacgttgatttttaaagcaggggaggatacaccgtgacattagttttaagcgttttagagcagggcatgatttatgcgatcatggctcttggaatatatatcacatacaccatactggattttccggatctgaccgtagatggaagctttccgcttggagcggcactttcggcggtgctcatcacaaagggcgttaatccgatactcacactgcttgtgacatttgcggcaggtgcgcttgccggaatgctgaccggaatcatccatgtgaagctcaaggtgcgtgaccttttatcgggaattatcatgatgacagcgctttacacggtgaatcttcgtattgcaggaagagcaaacctgccaatatacaatatgaccacacttttcgacaatgattttgtcagaaatgtatttaagggcggcttagcacagttttcaaatgtgattatcatccttgttatcacacttgtgatgaaattcctgctcgactggtacatgagcacaaagtcaggatatctgcttcgcgccgtaggtgacaacgagactatcgttacatctatgggtgtggacaagggcatcacaaaaatcatcggccttgcaatcgccaacggcctttgcagcttaagcggatgcatttttgcacagcagcagagatatttcgacgtatcaatgggaaccggaacaatggttatcggactggcgagcgttattatcggaatcagcctgcttaaaaaggcaacatttttgcgtgtgacctcgagtgttgttatcggagcgattgtatacaaagcctgtgtggcaatcgccataaagcttggtatgccgtcgagcgatttgaagctcattacagcggtattgttcctcatcattctggtgcttggaatggatagaaacaaaagaaagaaggtggcataatgttagaactcaaccatatccacaaattatataatccgggaacagtcaacgagatatgcctctttgatgattttaatctgaaaatagatgatggacagtttgtttccgttgtaggaagtaatggctcaggaaagacatctatgctcaacatcatctgcggttctatccctattgacggtggcagcatagtggtaaacggcactgacatcacaaagcagaaggattttatcagacaccgccgtataggtcgtgtatttcaggatccgtcaaagggaacctgtccttccatgacaatccttgaaaatctgtccattgctgacaataaaggaaagacatacggtctgggccgtggtacaaaccacagcaggatagagcattacaaggagatgcttgccgagttaaacctcggacttgaggataagcttcacacaaaggttggcgcactttcaggcggtcagaggcagacacttgcgcttctcatggctacgatgaatccaatcgagtttctcatccttgatgagcacacagcagccctcgatccaaagaccgctgagatcgtaatgcagctcacaggcaagattgtggcagagaagaaggtcacaacaatcatggtcacacacaatctgcgctacgctgttgaatacggagaccgccttattatgatgcatcagggcagggcgataatcgacaaggccggcgccgataagaaggctatgcaggttgatgatattcttggcacattcaatgagatcagtattgagtgcggaaactagggtgtgcgaaatgtaaatatgtgaggtgttgataaaacgcatcatgtgttgaaaatatagtgaagtataggaaaaaggacattccggaactgtagattttacagctctggggatgtcctttttactgatatgaaagctattataaaagtggaaaatctttcaaggtgcaaaaatttcaccttgaatgtgggaagaggtttaaatataaaatacaaaccttatgtgtttacagaacggggattgtatatgttgttgaagattatggcgtatctaaatatgccccagttattgcagctctgttgaaaaatccccctttggttttaccacactaaaacgtcggtaaatcataccctcatcatccccgacataatacatcctccggcggctccacattcaataacatcagcaagtcgcggaacactaatgtctggcacagcatcataagtggatggtgaatcggaagctgtgctgttatcgtttgaagcaatattgataccgccgattgcataaaccggtatctcaaccgcatcacagacatttttgaggaaatcaagtccgcgcggaggcagtccttttttgcagtcggttgcaaaaatatgtcctgccgtcatatatgtggcaccaagctgttcggcttttatggcatcttctacagagtggacagaggttccgataaccttgaagaattgttgataattgtcagtgctttttgacatacctgtggatatattgccggatacattttttttgacataagcttcaaggattggcaatggcagatgtatatatggatgctcaagttccattgctacatttataaagctgtgcagcatgcactgcacatcatattttttacacagagcaatcacatcgcgtgccagagacagatattctgcctccggcatatccttttccctgagcacaattgcatggggatggagcttacagacgcgctcgagctgttccatgaacggacggctgcaaaggtgtctgtttgtgatagcgattatattatcactctgtaaagcatgttttgagttttcgtataagagtttttctttattcatatttgttcctacatattcatatatacatatttatacctgttaaaattaagatgattactgattctaattcaagcatttcattgtttacaggattcctacacgtaaatatagtcgctcatcaccggctgcaaaccattgtcgagcagtgcattaaatacctcatccacgcttctgccatcagagatttcaaactggtcatcgcccttgtcctctatatcgtccacatggcttccgattccggtgctgacaccggctgaaatcttggtggcggcgatatttacaagattgtcacgcacacgcgctacctctctagtagatatggtgatgcttgcaaacggcatgaagagcctgtaagcgcataccacctgaaggagctgtgtctcgtggacatcctttggattgatacggtcattgtttatgatagggcacagacgagggcatgagaatgcaatctcggctcttggatattttttctggagcaggtatgcgtgatatccggtggcaagtgcatcctttctgaaatcatcgagacctaaaagtgcggcaaagccgacacctctcataccgcccttaagagcacgctcctgtgcatttacacggtaagggaaaattctcttgtgtccggcaaggtgaagagtctcgtatttatcagagttgtaggtctcctggaaaacggtcacatagtcagcaccgcatttgtgcaggtatgcgtactcgtcagagttcataggataaacctcaagacctataaccttgaaatatttgcgggcaattttgcatgcctctccaatgtattcgacgtctgacattttcttgctctcaccggtgagaatcaggatctcctgaagaccggttttggcgattgcagccatttccttctctatttctgaggcattcagctttgcgcggttgattttattgtgacagttgaaaccacagtagatacagtagttttcgcagtagtttgatatgtaaagcggtgtaaacatgcacacgctgttgccgaagtgctttctggtctcaagctgtgcagcctgtgcgatttcctcaataaatggctgtgcagcaggcgagagcagagccttgaaatcctctaatgtgcggtattcgtgggagagcgccgctcgaacatcggctgcggtgtattggtcgtagtcgtaggcatccatttcggcaacaaccctgtccatgatatcggagtcaagcacctccatatcaggcagatatttcatatggtctattctgtttttcttcatgtcctcgaggattacttcgtttacaatgctgtcgttgaagtggtcatcgtgggcgatatttgcattgatatctttgtcatttgttatatttgtatcgttagtcattatgtgttcccttcaaaagctaagtgtcatttatgattagtcgcgcagatatcctgtcagaggagatgatgcgctggctcctttggtcagagtgcgtccgagtcctgacagataagccattcttccggcctcgatagcctttttaaatgcctctgccattatctcaacatcaccggctgttgcaacagcggtgtttgccatgactgcggcagcacccatttccatagcctcgcatgcctgtgaaggacggcctatgcctgcatccacgatgataggcagatcgatttcgtcaatcagaatctggataaattcctttgtgcagatacccttgtttgagccgattggcgcaccgagaggcatgatgcaggcagcgccggcgtttgcaaggtctcttgccacattgaggtcaggatacatgtaaggcattacgacaaagccctccttggcaagaatctctgtagcctttattgtctcaaagttgtccggaagcagatatttgctgtcgcgcatgatttcaattttcacgaaatctccacagcccagctcgcgggataaacgtgcgattcttacagcctcatcggcatttctggcgcctgatgtgtttggaagcagtgtgacattgtccggaatatagtcgaggatgtttgccagtcctccatcgtttgcacggcgcagagccagtgtgataatctgtgcatcagccttctcaatgcaggcctttaccaggtcgagtgaaaactttcccgaaccgagaatgaaacgtgaggtaaactcgtgacctcctaaaactaatttgtcgtttgctaaatctatatttttactcatgattaactccttatatttttattgatggtgtaaaaagtgtttgtttttaatcagcccccgcccataaagcttaaaatctctaccacatcgccgtcggcgatagcagtgctgtcatactcagtctttggaagaatctcttcattcagctctacaacgatgtgcttagggttgtaattgttagctgaaagatactgcgaaacagtcatgccgcatacatctgtagcttctttaccgttgatttttaccattgtgcgtctcctttccggattgagatgtggaaaaagcgaggattatcccgaagcaatatactaaaaaagagttcacaaagcaatacacccgcggtggtgtaccccttcatgaactctgttcactctcaaaaatccgttattaaactatgtaaatatgtaaaattaaaagggagataccaataattttacaaacatgagtatagtaccttgcaccggcaaagtcaactgatttttaataaaaacgcattacgttactgatatgtagtaaccgcattacaacaatttccaacaaattttacataacgcagacagtatattttcattagaatgatatgattaaagggtcaaaaggtatcatcgatgtcataaatgaggggcaaaataccttttgacactcatatcatgtaataaaaggtaataaaaatggtattgaataatttctaaaaattctgaccgctgatttgatggaggaaaatatgtttgacgaagaaatgataacaaaatacagatacataatattacttcttggtacagcagtatcgtttgtgtttggctttgcggtggcatttgcacttgctaagctgtgtggagtgatggctgtaaaggcagtgctcaatatcgctttcacggcaggcggtatcacaggaatgcttggatttgtgtgcatctgtctggctgagcttagacgcatatagttacacataaaaatgaaagaaaacggaataaattattttgacatacgacgaaataaaaaagaacaaagaaatatgtgaatgcctccgataggaagatgggcattcatgcgcaggatgagtatggatctgaatagttactgattttacataaaaagtgcatattcgcacacgaacaaaacaaaatacaaattttatcgaaaaacttacttataaagtttctcagcccttgaacttaaaaatgattgatagtataatttaaacgattggtgaaaataagattaaatgataaggaggaaatcgcaatgattacctggaacaacttggatacactggaatccttcaaggagctttctaaagtgggacgtgttgacataaaagaggccatgtcaggagacaatggcgctaagcgtgtcaaggaatacaacatcccaatggcagagggattcacttacaacttcgctgcaaagcaggtggacgcagatgtgcttgaggcacttgcaaagcttgcaaaggaggctcagcttacagagaaatttgaggcactttacaatggtgctgttatcaatacaggtgagaaccgtctcgttcttcaccagcttacccgtggacagctcggagatgctgtagtggcagacggagttgacaagcgtaaattctacgtagagcagcaggagagaatcgctgagttcgcaaacaaggttcactcaggcgagattacaaacgcagcaggagagaagtttacaacagttgttcagataggaatcggcggaagcgatttaggacctcgtgctatgtacttagcacttgagaactgggcaaagaaaaacaatacattcaagatggaagccaaattcatcagcaatgttgaccctgatgatgcggcaagcgtacttgcatcagttgacgtagctcactctatttttatattagtatctaaatcaggtacaacacttgagactcttaccaatgagtcattcgtaaaggatgcattaaagaacgcaggacttgatgcttctaagcacatgattgctgtaacaagcgagacatcaccacttgcaaagagcgatgattaccttgcagccttcttcatggacgattacatcggaggacgttactcatcaacatcagcagttggtggagcagttctctcacttgcattcggtcctgaagtatttgcacagttcctcgacggagcagcagcagaggataagctttcaaagaatgcagatatcatggagaatcctgagatgctcgacgcactcatcggtgtttacgagagaaacgtactcggatatcctagcacagcagtgcttccatactcacaggcactcagccgtttccctgcacatttacagcaggctgatatggagtcaaacggcaagtcggttaaccgtttcggtgagcctgtagattatgtgacaggaccggttatctttggtgagcctggaacaaacggacagcactcattctatcagctccttcatcagggaacagatattgtgccactccagttcatcggcttcaagaacaaccagcttgacacagatgtagtcatccaggacagcacaagccagcagaagctctgcgcaaacgtagcagctcagattgttgcatttgcatgtggtaaggcagacgacaacaagaacaagaacttcgagggtggacgtccttcaagcatcatcatcggagaccaggtaaatcctgcatctcttggtgcactccttgcacactttgagaacaagattatgttccagggcttcttatggaatgtaaacagcttcgaccaggaaggtgttcagcttggaaagctacttgcaaagaaggttctcgcacatgagacagacggagcgcttaaggaactcagcgatatgcttaatatttagcacatcgttttgcagaggtgaagatacagaaatataaaaacgagccacaatcctgtgggtatcaggattgcggctcgttttattctgccataaatcatccgggttaaagatgatgcatgacgaattgggtgagataatttatttaggtttatagttactaatgttgataaatgttatcattatttgtgtgctttgtgaaagacaatatcatccttgatattgctgtcgtatttggtataagcacggccttggctgttctttccggctgcatcactgtcgtccttctcaggaccgttctccatccaccaggcataggctgcagcgccgatacaaacggcagcacacacgacaattattattgtttcaagcattttaaatcctccgttttactttgtcagcatgacgcggagaaaatgtttatttaatgtatctaagttatatttcctccgcatatgcgcgagttttgaaataatcagcgaaggaaattagtttatgcccatccttgtcgtggataaaacggataataaagcgccggctcgtgtttgtgaggcatatgcgcatgaccacgatagcggcatatgcgaataaaataatatgtattaactggagtaacgcacccagccagcttaaattggatgtaagcctgcctaaaaaaccaagcgaagaggtacggatgcggcatatgactgcaggaaaagaaggtatttcttctatatactggcaatccatgagtgccgacatatctgactctgaataaagcactgcgcgtgagtccaagacttcctgctgtggaagcgcggccttatcagaagaagcataagagccccagacaaccctgtgatcgtatgaaccgtatgctgtgcggtcaggatcaaattcgtccagatttttgtcgagacttagaaaggagcagaatataagacaaagcaacagtggtaaaaccagtattttcttcatgagagtccgctcctttccttccaatttatgtttctattttcttcctttaggttaaaaaagtcaacttgtaagtagatttcttttcaaaaatattgaaattcttaatgggctgtaattgtaaccaaatgattatcttaaatcaatgatatacatattgcataaaaaataattgaaaatttatgcatgtttgtgcatcacgataatagacatttttcatggcacgtgatactataattaacgtaaaaaccccccaatacattatatatttttactatccccatagtaaaataccttctcctaaaggacagcagaacgatggctgttctttttttgtcccaaaatagtgtatatttcgggaaacaagcagatataatattgttgaaatgatttagacatgatacaatcggattagatattagatagcacgcaagaagcgagacatgctgataacagctctctttcttcaagcctgcagacattgaagactctgatgtcataattcagagtccctgacaccaaatactgtgagcagatgatagttgcttcacgtatgaggaggaagaacattttgagattaagggtgtacttccggcgaagtgcacccttcttttagtgaacaaagagctttgttcatattaaatacaagatataaggagtaacgcatggaaacaagaatagccctgatcggcattatagttgaaaacccggattcggttgagcagcttaatcatctgctgcatgagtacggcagctttattgttgggcgcatgggtatcccatacgagaaaaagaacgtgaatatcatcagtgtggcgattgacgcaccacaggatattatcagtgctttgtccggcaggattggcaggctggatggcataggagtgaagacagtttactctaataaataaagcagaccagactacaggagaaagcatgacagaaaatacagcaataataaaaattatagatgaaattacggcctgccggaatatcaccctcgagcagctgcatatgctgcttgagacggatgatatgcaggcagttgattaccttagaaagagggcatctgagaaagcacacgagacctatggcaatcaggtttttatacgagggctgatagagtttaccaattactgcaaaaacgactgtctctactgcggtataaggcacagcaatacccatgcggaccgctaccgcctgagtacggagcagattatggcatgctgcgagagcggctatgagcttggttttcgtacctttgtgctgcagggaggtgaagatccgtactacacggatgagcgcatctgtgagatagtgtccgggattaaggcaaagtatccggactgcgcagttacactctctatcggagaaaagtcaaaggagagctatcagagctattttgatgcaggggcagacagatatctgctgcgccatgagactgcggatgaaaagcattacagtaggcttcatccggcagagatgtcacttgaaaacagaaagcagtgcctttgggatttgaaagagataggatatcaggtgggatgcggcttcatggtcggatcgccgggacagacagtggagaccttgtacgaggatttgcagtttataaaggagcttgagcctcacatggttggaatcggtccgttcatatcgcagaaggatacaccttttgcaaacgagaagtcaggtacgatggatgagacgcttcgcctgctttcaatcatcaggctcatacatccaaaagtgctgctgcctgccacgacagcgcttggcacaatccatccgctcggcagggaaaagggtatacagtcgggtgccaatgttgtgatgccaaacctctcaccggtcaatgttcgtgacaaatacaagctctacgacaataaaatctgcaccggagatgaggcggcagagtgccgcttctgcatggaaaaccggatgaaaagcatcggctatcaggtggtggtgtcgcgtggtgactacgcagatttttgattaatagttacgattaataaatataaaacaacaccaggatatagaaggagataaaaatgtacaacgtaaaatcattaaaggctgaagaatttatttcagacgaggaaatcaaagagactctcgaatacgcagaggcaaacaaaaataatatagggcttatcgatgcgattatcgagaaagcaaagctaaaaaaaggactcacacacagagaggcatcagtgcttttagcctgtgagattccggagaagcttgacgaggtttacaagcttgcacagcagataaagaaggatttctacggaaacagaatcgtgctttttgcaccgctttatctgtcaaactattgtgtgaacggctgtgtttactgtccatatcacatgaaaaataagcatattgcgagaaagaagctcactcaggaggagatagtaaaggaggtcacagcccttcaggatatgggacacaagcgtcttgcaatcgaggcaggagaggaccctgtaaacaatccgattgagtatattctcgagtgtatcaacacaatctacagcatcaagcacaaaaacggagctatccgccgtgtaaatgtaaatatcgctgccactacagtggagaattacagaaaactcaaggaggcaggaatcggaacctacatactcttccaggagacatatcacaaggagagctatgagcagcttcatccgacaggaccaaagcatgactatgcatatcacacagaggccatggaccgtgctatggagggcggcattgacgatgtgggacttggtgtacttttcggacttgacaaatacaagtacgagtttgccggacttttgatgcatgcagagcaccttgaggcagtgcacggtgtaggtcctcacaccatcagtgtgccgcgtataaagcacgcagatgatatagacccggatgtatttgacaatggcatcagtgatgataccttcgccaaaatatgcgcacttatccgtatttcagtgccatacacaggaatgataatctcaacccgtgagagccaggctgtccgtgaaaaggttctgccgctcggtgtttcacagatcagcggcgcatcaaagacaagtgttggaggttatgcagacccggaggctgagaaaaatgcagaggcaacatcggagcagtttgatgtcagcgaccagagaacacttgacgaggtggtaaactggcttatgaagatggactatattccgtccttctgtacagcctgctacagagaaggcagaacgggagaccgttttatggcactgtgcaagagcatgcagatacttaattgctgtcatccgaacgcactcatgacacttaaggagtatctcgaggactatgcaagcccgcagacaagagagcttggaatgaagctaatcgacagggaaatagaaaagattaccaatccaaaggttaagcagacctgctatgagcatatacatgatattgcagacggaaagcgtgatttccgtttctaaaggaggacatatgggaaatttgaatgagacgccttctgccaacagacttcatataggtatatacggaaagacaaacagtggtaagtcatctctgataaatgcggttacaaagcaggaggtttccattgtagctgacgtggcaggtacgacaaccgaccctgtgtacaagccgatggagatacatccgctcggaccgtgcgtgattattgatacggcgggctttgatgatgatagtgagcttggtgaaagacgtgtggaaaagacccatctggcagcagagaagacagacatagctgttgtagtgcttgatattgcagaggtcattgccgcaaagaaggcaggggtaccgtttaaaaaagcttttaaggatgaggcagagtggagcctgctatttgcaaaaaaacatactccggttgtatttgccttaaacaagatagacgagattttgctttccgcagaggctcaggaaaagagcaggggaaagcttgacaatgctgcaatagaggccgcgaagtgctgggtttatgaggaaaacagtgctgtgatgggcaaaaatgcagacaatagctttgaggttgtagcagtcagcgcattaaagggcaagggaatggatgccgttatctctgcactcacacgccttttgcctgaggatttcggacaggaatttatcctgggagaccttgtttctcagacagacctggtgcttcttgtcatgccgcaggatatccaggcgccaaagggcagactcatattgccacaggtgcagacactcagggaattgctcgatagaaaatgtcttgtgatgagcacgacgactgacaaaatgacagatgcgcttgcagcattatctcacgcgccaaagctcatcgtgacagattcacaggtgtttggctatgtgtacgagcacaaaccggcggagagtatgctcacatcattttcagtgctttttgcagcatacaagggtgatctgccatattatgtggagagcgcaagggcaattgatgccttaaagccatcctcaagagtgcttatcgcagagtgctgtacacatgcgcctcttgcagaggatataggcagggtgaagcttccgaacctgcttcgaaagcgtgtcggtgaggagcttaccgtggatattacaagcggtacagacttccctgataatctttctcagtacgatctcgttattcagtgcggtgcttgcatgtttaacagaaaatatgtattatcaagaatagacagggcacgcactcagcatgtgccgatgacaaactatggcgtggctatagcacacctgacaggaatactcgataaggtgagcatgccctagaaaaaccttaaaagccgggaggaagagaagctatcggtatgacgaaaacaagcgattttgacgacaaagtgaattatagtggcgattataaaggcaattacagcggcgattatagagacaattacagcagcgattatagcgccaccggttacgctcgtctggcgaagagtcttattgatatagtaaaagagcagcaggcgaagcttggctacaggaaggaaatagtcagactgtattatcctctttccacgctcagacatttctttgagtgtgcaggggatgacaataaaattgcagccggcgtaatttcagagcagcagatgcttgaaatccttgctccaaacaacctgccaaaacagcttactgacaccataggtgagataaaggtcaccgcaaaaaatgagcgtttttgcatagagataccacctgagggcagtgagtatgtgcatgaaaacacagctgacaacgagtttataagggagctgattacacttgtcggcacgcatggctgcaccatggagcagataactgagttgttttacaaatactcggacgacatcgaaaaaaaggaaatgcaaaacggcgagtttgactgttacatccgcttcttaaatgagccggatgacacatactactattgcttccatgatgagggctgccatattatttaccatagatttctgccgcaggattatgcggactttggattttaatggataagtttctttcttttggtgttggcctttgaatttactttgaagttacacgaagacatagtttgacaaaaatataacaatcgtaatataatggcggttgagagtagggtttatgtataatacgcacatcaggagatatacacatggcaacatttaccagaaaagccataatgcagacttttttacatatactgaaaaacaaaccgcttgacaggattacagtcaaggatatatgcgagcagtgtgagataaacagaaatacattttactattatttcaaggacatatatgatgtgcttgaggccatatttgaggacgaggtcaggcttgtgatggatgaggcaaaggaaggcgtgacatttcatgatgcatatgccagagtcgctgcccttattcttaataaccgcgaggcgataatgcacatttatgcatcggaaaacggcagggtattaaggacatatctggatgccgtggttacgcaggtggtgcgccgctttgtgttggaaaaggcagagggctacagcctggatgatagtgacattgcttttatcacggcgttttacagcaacggaatcgtgggcagtacaattaagtggattgagagaggcagtatgatgagccgtttgcctgagaacattacggcaaatggcgttggactgtcaaaaagccaatacaacagagatattgttaagagaataggtgactctttcgatgccacaatttatgatatgattgagtgctgtctgtaggcaggcggatattgtatgacaaaataattcgaacagatttgacagagtgtctgaatttcagacactcttatttttttgtccattttaaagacgattatggtggattagaatagcagacaaaaaggagggagatactttatgcacacattggtacgtgtgaaaaatgcatacactgtcatgacaatatgcctgattgcattgggggcagctttgttatttgcgccacagcttggacttaggactttgtgcgtggtgtatggagtgtttctcatagtatacggagtgacaaagttgtccggatattttgcaaaggatttatttcagcttgcgtttcagtttgacctggcgcttgggatagtttcaatagtgcttggaatcataattattaaaaaaactgagtatattatagagatattgtctacagcaataggcatttttatgttggtagatggagcgttcaagatacagactgcagtggaagcaaagcgttttggcatcgagagatggtggctcatactcgtgatgtcgtttgtagtggcatttgtgggaatactgcttcttgtgacaccatttgagaccgcaggcatgatagtgagattaataggactgaatttgagtcttgacggaatactaaatttatttgtcgtcagaaataccgttgaaacaataaggaggaatacaaagtgggaaatttaggacatcaggcagcgagacttgctgcatcaaaaatatgtgacaacattgtaaaaggactttgcaaggacccggagacagaggttgtaaagcttatcgacatgtggcagaaatttatgggcgatgagaagattgatttaaactatgacagtgcgcgcaagatgatctgtgataaggactgcacgctcaacaagtacatgcatcgtcttatcaacgagatagatcctcatgtattaaagacaatcgcgctcaatctgggctttgaggcatttgtttacggcacaaaaaccatccgtaaaaatcgtgaaaagtatggctgcaatgtgccatggctcattcttatggatccgacaagtgcctgcaatctgcactgtacaggctgctgggcagcagagtatggccacaagttgaaccttacctttgatgagatggataaggtcgtaacacagggcaaggagcttggagtatatctgtatatgtttacaggaggggagcctcttgtcagaaaatcagaccttgttaagctctgtgagaagcacagtgactgtgcatttctggcattcacaaacggcacactcgtggatgaggccttctgcgcagacttaaagcgtatcggaaatttgtaccttgcaataagtcttgagggcttctcagaggtaaacgacttaagacgaggcacaggtgtatttgcaaaggttatgcatgcaatggatttgcttaaggaaaacggacttgttttcggtacatcaatatgttacacttcaaagaactataagacagttaccagtgatgagtttatcgacatgattgtggaaaagggctgccgctatgcgctttacttccactatatgcctgtcggaaacgatgcatcactggaacttttaccaaaccctaagcagaggctttacatcaaggaccgtgtccgtgagatcagaaatatgacaagcggcaagggaattttcactatggatttccagaatgacggcgagtttgtcggaggctgtatcgcaggaggaagaaactatttccatatcaatgccaacggcgatgctgagccatgtgtatttatccactactcaggagccaacatccgtacacacagcatgcttgagattttgaaacagccgcttttcatggcatatcatgataaccagccatttaatgagaatcactacagaccatgtcctatgcttgaaaatcctgagatcttacagcggctcgtaaaggaaacaggtgcaaaatcaactgatttgcagtcgcctgagagcgcggagcacctgtgcaacaagtgtaaggagtatgcgcaggcatggaagccttgtgccgataagctttgggcggaggaaggacacagtaattaatgatatttgaaacacatgcccattatgatgatgacagatttaaggacgaccgtgatgaaacaataaaacgcgtccatgaaaaaggagttgccccgataataaatgtcggggcttctattggctctaccatgactacaatagagcttgcaaagaaatatgactttatatatgcagcggttggagtgcatccaagcgacgtagctgatttaaacgaggaaacctttgcatggcttagggaacagactgcatgggaaaggactgttgcagtcggggaaatcggactggactattactgggataaggagccaaaggtgcaggaaaaccagcgctactggtttaagcgtcagcttgagcttgcagcagaagcatcgctgccggttatcatacactcgcgtgatgcagcacaggacaccatggaaatcatgacagaagcagcaaaaaagaatatccgcggcgtgatacactgctattcatattcaccggagatggcactggagtatgtaaagctgggatattatatcggagtgggaggtgtcgtaactttcaagaatgcaaagaagctggtacagacagtgtcagagcttccacttgatagaatccttcttgagacagactgtccatacatggctccggagccacatcgaggcacaaggaatgattcgtcaaacattccatatgtgataaagaagatagcagaaatcaagggcactacaccggatgaggtagagcgcacgacacgggccaatgcatttgaacttttcacacgtgtaagtgattgagccacaacgtgagggacgaaagtcgggaaccgccgccctgccatagggcacgtacactcccgcgtgagcgaatagcgaagcggtttagatactgtaggattatgcttaaatacgcagaaatgcccagccatggacggctgggcaaggcgttatgcgccatggacggtgcataaaagccggtttcgtcaagcatagaaaatctttagacataatccgtacagaatcttaactgcgaagcgtagctcacgcgagagtgtaccgtgccccatggcagggcggcggttcccggctttcatcccgggttttggcaaaaccgcgaaaatttacaaatataattgaaataaaggcatttcatgtgataatataaaagataatgacagcagttgtactgtcgcatcagatgaaacgacacaaggagtgcatatcatggcatatttgggaaatcctaagaacacaatcgaggttctgcagaaatacaatttcaattttcaaaagaaattcggacagaacttccttattgatacaggcattttggaggaaatcatagactcggccggcatcacaaaggacgatatgatacttgagataggcccgggaataggtacgatgacacagtatctgtgtgagtcggcgcgccaggtaatagcagtcgagatagatacaaatctgatacctatacttaaggatactctgagtgaatatgataatgtaaaggtcataaatgatgatatattaaaggtagacataaatgctctggcagaagaatataataatggtaagccgataaaggttgttgcaaacctgccatattacataacgacacctattattatggggctgttcgagagtcatgtgccgatagacagtattacaattatggtgcagaaggaggtcgcagaccgtatgcaggcaggtcccggcaagaaggattacggagctctgtcacttgcggtgcagtattattcgcaccctgagatagtggtaaatgtgccgccaagctgtttcatgccacagccaaaggtaggaagctctgttatatcgctcaagcgatacgaaaagccggtggttgacgtagatgatgaaaagctgatgttcaaaatcatcagggcatctttcaaccagcgcaggaaaactcttgccaacgggctcaacaatttcggtggtatgggactgaccaaggagcagatacagcagagtatagaggctctcggagttcctgtaaatgtgcgtggtgaggctctaagccttgcacagtttgcgcaattatcaaatataattggtgccgcaaaatagaaaaagcatgaataaatccatgcagacaggacatactatcatcagaacaattcagatgatggaggtaatgtcctatgaaaaaacaacaaattgcagcagcggcatgtctcgtggctggagccataggatttgcagcggtatattcaacacagaaacccgggaaagacgagataccaacagaaatttcacagacttcgtctatagttgagcctacagagaaaaagacaccacagaaaactacagaaaaagtagactcagagaaaaaaatgggacaggaagaatcagctgcagggcagcaggaaaatcagcagcccacggaaaaacaactgcattttgtcccggaaaatgtgacaaactggcctgtaaagggagatgtgcttttgccgttttccatggacaagacggtttatttcccgacactcgaccagtatcagtataatcgtggcatggtaatacgtgcaaacgaaggagatgcggtatgctcagtcaccgagggcaggattatagacatatatgacagcgcagagacaggctgcacagtagtgcaggatttaggagacggctatacggctacttacggacagcttgcaaatctaacctgcagtgagggcgatgtacttgaggcaggagaaacacttggaacagttggaaaggtgaccagatactatactgttgagggaaccaatgtgtattttgctatggaacaggatggaaaaccggtcaatcctatggactatttcggagatatatagaggtgaaaagtggagtttaacgaatacaatgagagtgtgaaaaactggacaaatggcattcttgacaattacagaaaggatgccgagctcacaatcagatattgccatgagctgatagattacggagaaaagacagcagattcaaagctcctgggcttcggatactatcatcttgccatgatactttattgcctgaatgactacgataacatttttgatatcgtggtcagggcgatagatcatctggagaaggcgcagagctggagcatgctggcgcgcgcatgcaatatacttggtatcatcacgtcaggcagaggcaatcagccggtagcatatgactattatctggatgggctgatgtactgcaagaagtatggtctgttggaagaacagagcattataaatgtcaattgcggagctttaaatatcaaagtgggcagatataaggaggccatggaatattttcaaaaagccatggaatacatagcttccgcaccggatgaaccttcatatcacaccaggatgatatctctttatgagaatatgataaactgcaaggtactggagagtgactttaccggaatagatgagattcttgagattgtggagagggagcatctgccgtatgccgatgcaatcgacaggcttggaatgcttatcagcagaaccttttacatgcataaaagcggacagattgaaaaacgtgacgagtgtatcaggcgcattgatggtgtaatcacgcaggatatgctttttatggatctgatagaggatttctttgtgtatctcgaggtgcttttcgagagtgaaaagattgatgaattctggcatctgatggagcttatggagccgatgataaacaatcttaaggtcacaagcatgcagatgagacttttaggtcttaaaatcagattttacagaaagcaccatatgggtgcagagtatctgcaggcggcagggctgtactatgagctttccgagcgcaaggagcttgaggccagggctatgataaaagaggtcatagagcttagggcgaatttcgagaaggtaaatcgtgccaagaaaaaaattgagaaggagaataagcttcttgcggcgcagtctgagacagatccgcttacaggcatggcaaacaggcgaaagcttaatatacaggcggatgagatgttttcgcatgctcataaatgtggtcacaattttgctattgagatactggatgtggattatttcaaagagtacaatgataattacgggcatcaggagggggacagatgtctgattgcgattgcgggctgtataagcgaagttgcgggagcacatggaggcttttgtgccagatacggcggggacgagtttgtagtcatatacgagaatatatcaaaggaagatgctaaagaatatgtggaggagcttcgccgcaaggttatggagctgactctgccacacaggttttcaaagatgctgcctattgtcacaatcacacagggcatgtattgcgatgtaccaaaggaagaaaacagagtgtgggattttttacatgtggcagatgagatactatacagcgtaaagacagacaaccgtggcagctgcagagtggtcgacagagcagagtttaagcttatgtcaggctatggcaccacgattcaggggcaggcctgatatcatattgtcatgtcataagcacagcgttgattattgagatggacaaagcagatatggatgaaaattatacatatattgtaaggtgtgctgacggcacactttacaccggttggacaaatgacctgaaaaagcgcataaaagcgcataactccgggaaaggtgccaaatatacaaagacacgcagacctgtggagctggtctatttcgaacactttgccacgaaagaggaggcaatgagcagggagtatcatataaaacagctcaagcgcgcacaaaagcaggctctgatagatgaaatgaataaaaataacaaaagtatttttacacaaaacggatagtcgaaaataactaaaatgaccaaacgccagtgtgagaatacttatttttttgcaattctttgtgaaaaattgccaaaaaatacctggtgtttttattaatatatacagaaaagacaaaatcctcttgcgaaactacatgaaactgtctataataattcttgtgaaaacgttaccgcaaacattaccgaaaacaaccaaggatgtttgcaaagacaattttaatattaaatcttttaggagggtttaaaatgaaaaagaaattagtaacagtattactcgcttcttcaatggtagcaacaatgcttgccggatgtggatcaggaagcggagacggaacagagaaaggctcatctgcaaagggcggcgatggctcagtttacatgttaaacttcaagccggagacagatcaggcatggcaggatcttgcagagaagtacacagatgagacaggcgtacaggttacagtagtaacagcagctgatggacagtacaagacaacacttaagtctgagcttgctaagaaggaggctccaacaatcttcaatatcggaagcacagcagactgcgcagagtatgacaaatacatatatgacttaaaggacagcgagatttacaagcaccttacagataagtcacttgcacttgagtataatggcaagattgcatcagtagctaactgctatgagtgctacggaatcatctacaacaaggcaattcttgagaattactgcaaaaactactcaggagcagttatcaagtcagtagatgatatcaaggatcttgatacattagagaaggttgcaactgatatcaacgagcatgtagatgacatcaacaaagcttgtgacttacatcttacagaggcatttgcttcagcaggacttgacagcggatctaactggagattcacaggacatctcgcaggtctcgaactctactatgagttcaaggatgcaggatgtgatctcacagcaggacagaaggaagttacaggtaagtacatggacaacttcaagagagtttgggatatgtacacaaatacatcagcagcagacaaggctacacttgattcaggaagcttaaatgctgagtcagagcttggtatggaagaggctgtattctaccagaatggtgactgggagtatgctaacttcgcagatgacaacgagaacggatacacagttaagcagtctgacctttcaatgatgcctatctacttcggtgtagatgacgcgaacgagggacttgcagttggtacagagaaccactggacagtaaacgctaaggcagatcagaaggatattgatgcaacacttgaattcctcaactgggtaatcacaagtgatgacggacgtgatgcaatcgttaataaaatgggtctttcagctccattcgatacattcacaggcgactatgagtcaaagaacgcttttgctaatgtagcatcagagcttgcaaaggaaggcaagacatcagtagcatggtcattcaacgcaacaccttcagtagatgactggagagctgatttccttgctccactcacagagtacacagagcgtaatggttcatgggatgacgttgcaaaggcattctcagagaaatgggcttattactgggatcttcagaacgagcagtaaaattctctaaaagttagtaaaaagtagtaaaagtggggtgagtggcagtcactcaccccatatttttttaagaaaggtatatttgttatggaaaagtcgattagaaaaaaattttggatcttcgctttaccgacaatggcagcatttacaataggatttattgtaccgttcgtatatggtatcttcctttcattttgtaaattctccactgttacagactggaaatgggtgggatttaaaaattacacaaggatttttgttgtaaacggcagtgtggatacaacctttattcattcaatctggtacacagcactatttacagtagtttcggtactgattatcaatatcgtatcatttgcaatagcaatggcgcttacaaaaggaatcagaggaacaaatcttttccgtacagtattcttccttccaaacctgatcggtggaatcgtactctcatatgtatggttgatgatttttaactctatcctgcagaactattcaaagacaatcgtaagctcagagtggtcagcattctggggacttatcgcagtagtatgctggcagcagattggatatatgatgattatctacatcgcaggtattcagaatataccgggtgagcttattgaggcagcaaagattgatggagccaacagatggcagctcttaaagagcgttattcttccaatgcttatgccgacaatcacaatctgtacattcctgacactgacaaacggcttcaagctgttcgaccagaacttagctcttacaggaggtaatccgggaaagatgtcagagctgcttgccttaaatatctacaacaccatgtatggaacaacaggatggcagggcgtaggtcaggcaaaggctgttatattctttataattgttgcaattatcgcacttgcacagaataagattactacaagcaaggaggtacaggactaatggcaaaacagaaaaaagcgcaggaagtcagtgccgtaagacaggccaagcacggttggataatcacattattattcactgttttatcagtactttggatttcaccaatctttatggtgttactcaattcatttaagagaaaagcctacatattcaagcatccgtttggaatcagcacagtatctatcactgagggctttgaagccttcaaggatggtatgtcaaggcttttctgtagcacattaaactacaagaatggtctcagaatgacacatttctgggactgctttggaaattcacttttcatcacagtcggctcagtagtacttattgtactctgctgctcaatgtgtgcatggtacatagttcgtgtaaagactaagggcacaaagcttatgtatacactttgccttttctctatgattgtaccattccagatggtaatgtttacattatcaaaatttgcaaatatgcttcatttatcaaatccactcggtatcatcattgtataccttggctttggagcaggacttgctgtgtttatgtttacaggatttgtaaagagtatctcattagagatcgaagaggcagctatgattgatggctgtacaccattacagatgtatttcagggtcgtatttccaatacttcgtcctacagcggtaacagtagcgatacttgaggcaatgtgggtatggaatgattaccttcttccatcactggttttaaacatcaaccagtacaaaaccataccaattgctattcagtacttaaagcagagccacggtatgattgactggggtgcaatgatggccatgctcgtgcttgcgattctgccaattgttatcttctatattgtatgtcagaagtacattatagagggtgtgctcgcaggagctgtaaagggttaatatagcttacaagaggatatagtttatgttattttaagccccacacttgttaagaaaacatgtggggcttaagctaaattagcaggttttgtagttgtggatatatgatataacgagtgaaataaattatatcacatggatataatgtaaaaggacgtatcgctgtccggacggggaaaacaatgacaattgtagatatagcaaaagaatcgggatactcagtaacaactgtatcccgagttttaaataacaggcaggatgtttctcctgcagcaaaagaaaccataatgaaaatagttgaggcacacaactttgtgccaaataccaatgcaaagaggctcaagcagaccatttccagaaatatttatctgttggtaaagggtacctctaatatgctgtttgcaaacgtagtcgaggaaatccagtcgataatagacagaacagactactctttgagcatcacatatctggatgaggacagtaatctaagcagtgtgacagaccgcatatgcagggagcgaaagccgcttggcatcatattcctcggaggcagcagggaggatttctcggaggatacatcttcgtttaaggtgccgtgtgttatcgtgaccacatcggcagaaaactggagcatggaggagctgtcatctgtttccattgatgatgagaaggcaggggaaacaatcgtcgactatctcatcgagcatggacatacaaagatagcagagattggagccaatctggagctttcacagacagctcgtctgcgacataacggatatctcaacagcttaaaaaagcatggaatcacacctgatgaacgttactatgagagagcgcgattctcatatgacagcgcatatcgtgcgatgaaaaagcttttggaaaaggatatagaaatcaccgcagtctatgcgatttccgatgtcatggcaatcggtgccttaagggcaatacttgataagggactcagggtgccggaagatatatctatcacaggctttgatggttcgacacttgcagagtactacaatcccaagattgtatctatcagacagccgcacaaggatatggcggcacgcagcgtggagcttctttttaacatgatagatttgcataaaggctcatgtcatgagataataccatttgagctgacagagggcaagagtgttgcccggattgattaaagactatataatatcagcttgttacattccggacatacaataaacgaggaggaatcgcgcatggaagtgaataataagatgaagcacaccataaaggtcgcatgggccaaagggttttcacagtttttagcactagcaggagcaatcctgctagtgtttgtgctatttaaattcgatgcaataatggcacagatagtgagaataataaacatacttatgccaatcatcatggggattgtgctggcgtatctcataaatccgatggtagagttttatgacagaaagctaagcaattcgcttggcaaagccatagaaaagaagtgtggaaagagaccttctatgagagggttgtcaatacttataagtctggccataataatagccattattgtagtgctcataatgatggtggtgccacagcttgtaagcaatattacaaatgcggtcagtcttttaccggatcagatacaggaccttgtgaaaaaaatcacggagcttgccaaaaacaatgacagggcaaaggaaataatcactgagctatacaataacggcataagctattttactgaatgggtaagggacaatatgctcggacaggttacctttgtgataaacggtattatgggaatctttggcacagcggtaaactgccttgttgcattcatcgttgccatctatgtccttcttagcaaggatacctttaaacgtcagactaaaaagctcgtgagcgcatttctgccggaacgccatatacaggtgctttcaagcatcttaaaggagagcgacaagatattcggtggctttatcagtggcaaaatcattgattcactcataatcggagctatctgtttcgtgtgctgcctgatactgcgcatgccgtatgtagcactcatcagcgtgatagtcggagtgaccaatgtcataccgttctttggaccgtacattggagccataccaagcaccatactcatcatgctcgacagcccgtcaaagggtgtgatatttttgctgtttatcattatcttacagcaggtggacggcaatattatcggaccaaagatactcggtgagtccacaggactctcacctttctgggtggtatttgcaatcttccttggaaatggattatttggagtagtggggctgttcatcggagtaccgacatggggtgtcgtgtactacctgataaagagatatgtgaattatcgtgtgaggaagaaagaataaacgtaccgttaaaaaataagttataaattttgaaaatagtacttgaatactggaaaatatgtgtatataatgtgtgaacgaggctttgaaaaagagcttgttcacacatttttttaatggattttctgcaggggtgaacctgctgggaaaagttattatgaatttaatttttggggagggtatttacacatgaagacagatatgaccaaaggcaatccaatgaaaattatactactgttctcgattcctgttctgatgggaaatctgtttcagcagttctataatatggtggacacgattatcgtggggcagtatctgggctcaaaggcgcttgcggcggttggctcgacaggctgtattatgtttctggtgcttggctttgcaaatggaatagcacagggctttggagttatggcaagccatgcgtttggtgcgaaaaaagagaagcttttgaagcattatgtggctttagctatcattcttactgtgattgtttcagtggtgctcacgattccgacagtgcttgcgtcgaggcagcttcttatctggctcaatacacctgatgatatacttgtcatggctgatgcgtacataaaggtcatttttgcgggaattttctgcaccatgtcctacaatgtggcttccggtcttttgcgaagcatcggagacagcaagactccgctgtattttttgattttttcatctgtattgaatattgtgctggatatattctttatcgtggtggtgaaggcaggcacagcaggagcagcttatgcgacagttatctcgcagggaattgctgcagttttgtcatttatcgtgatgtttaagaagtatgatttgctgcgcaccagccgtgaggattattacatggattggaacggaatctggcgaatgctctcaatcggtctgcagatggcactcaactattcaatcactgctatcggaacgatgattttccaggctgcggtcaatgtcttcggttcgcaggtggtagctgcgtataccgccgcatccaaggtcagcaatatcgcgacacagaccatgcctacacttggaacagccgctgcgacttactgcggacaaaatcttggagcaggaagatacgacaggatatttaagggtatgaagtcatgctttttcatatgtataggctgcgcagttttagcggcagcaattaactgctttgtcggaccgtacatgataggctggtttatcacatcgcctacggcaactgacattgactgtgctatgaaatatctgaaaatcgcgagtgtcttcatgcttccgcttgcatggatttttgcatacagaaacggtctgcagggacttaacaagggacttgtgcctatgcttagcggtgggatggagcttgtgtcgagatggattgcaatacttgctctgtcaaagccatttggttacgtcggtgtgtgctttgcagatccggcagcctggcttacaacaggaatactgcttattgtgacctactatgtgtgggagatgcgcatgaggaagaagatacagataaaatagatttcacacaaattggtttattcgtggtacaattaagccacggataaatcaatttcatttacagagataaagaggcggattgcatgaattattatgagctttcaaacactgtcacccctgataccattggatacaaaaatggcttatggcagaaaagatatgtgcagatttacagagtattgactgttgtatggagtgttttgacattatgcttgttgtttggaatgttccatagggatgactatagttcaggaatgattaaatcatgtttattgctcttttttgcaggtattatttttctggtgttgatgctgatcgctgttgttaatatatcagcgaaaaggacagagaattggagccttcaggacaggcatgattacaatttggctatgtacagaaccagatacaggaataataggcagcttcagtcagttgtgttgatagtgatggctaagcagcagcttcttatgtcaaactatgatctggccgcacaggctcttgcaatggttgatatcaattgtgtgaagctgccatatttaagagattattatttttgcaatgctgcagttttgttcctatgtgataagccgggctggcaggagtggctggataagtgctatgctgtgccggcgaatcaaaagcagatgacggacatgcagattggtgcattgtttttatcagaaaatgcaaaaatggatttgtgtcaggcaatttacgcagacaccaggataaagcataagtggccgacagcaattgtaattactgcgatattggtgttgtatgcaggaattttctatggagtaggaggcttactgtctcgaggatatcactatagatactggttcgagctgtcgtctgttctgataacatacgcaggctgtatggtcttgtcgctttactggataatcaggtggatattattcagtgacagcgtatctaaaaagtcagaaggggtaaggctattcagaaaagtaatactcatagtcatgtggctgtgtttgatggctgccatggttattaatctgataatttcattcatcggcatggatacggagaaaaaggtatatgcgaatggtcttatctgcatgagtacttcggatggatatagtactgatgaatattataacatcaaggttggacctttcctgagacgaaatttgacatttaaggaaacaataaagtttggacttataaacgatgatgacagcaccggagacagtggaaatgatgctggtgatagtggtgcaaatgacagtgaaaacagcactgagaataattcacagtcatacaatgacgcttctgaaaatacagaaaatgagaatgcaggaaatgagaacgctgacgaaagcctggatacagaaagcatggccgtatatgattacatgtcagctgcagggatactctcagccggggatgccggtattattcgcaacggttccacagctaaaggtactttttattctgttttcgaaaccggcgaggctgatggaaatacgtatgagaataggttagtttatgacagagtttccgaaaatggacagtgtgatttgtttgtttatgagcagttggttagtggctcagatacaaggctactgggattttatgctgtaaataaaaccacaaatgaggttttctcagcggatagaaactcatggggtggtgtgagcagcagggaatatcaggacgcaacaggagaaaattaggctggtacatgtcgcataaacgatgtactagctggttgtctccctgcgaatcagcacaggcgctatctttttgtgcgttggcgccaaatcgggctcaggattgctttgcttgcggttatccatctgcttaacgagtaaatccatggcggttcttgcgattacatctatctgctggccgatggtggtgattggaattatggcttcgttggcaattggtgaattgtcgaatccgactatctcatagctgtccggcaggcagccgtatttttgtatgacaaggttcaaaaacatgttggcatatgtgtcgtttgccaggaatacccctttctttttatcaggatatttctcatctatattgttaaaaatcaccttcatctgagaaaataaatcgttgtacgaatcaccggatacgttcagactgagctcatagggaatattgtgctcggtacaggtgtcctcaaacgcacggattctgtcgtaagccgggacatactttggtacatctacattgacatggatgaggatatcacatttgtcacgtattaaaagagatgtggcctgaagcgcacccatatagttgtcggaggcgacactgcttatatgcatggattctcgctcgattgcgacaattggaatgtggtatgaagcaagcttttcagatgagagagtgtgacttagcacgataagaccctctatctgataagctaaaagttcatcaatgtagttttcttcctcagccgcccccttgtcactcataaagatgagaaacttatagtgatagttagcgtaagtggctaaaagctgtgtgagcatctcagagtagtagtgcaggtaaaggtttggcactattatgccgacaaactcgctcttaccgtttgcgagaacctttgcgagcttattcttcttatagccgagttcatcaagcgcacgggaaatcttttcctgattctccagtgtcagagagtccggatgattgaaatatcttgaaatcgttgtttttgaaaaatgtgtatattccgcaatatctgcaaatgtaacctgtttttttcccatgggatgtctccttataaaaattacttatattacaaatgtttataaacagtatacagcgcaatttccaaaatatcaacaaaaaagtaaccggttactttttttgagaaaagtattgacacagcataaatgatattgtattatcaaattacaaagtaaccggttactttaccggttacacaagagcgtaaattaagtaaaaaagacaaaatgtgaaaaagagtggaggtcacagcaaatgaaagaaaaaaagcagtcattgaaaagcaaagtgacatatgtgaagaaaaactggatgttgtacatatttttccttatgccggcacttttactgacaattatattcaagtatgttccgatgggcggactgctcatagcattcaaggattacaatgtcataaagggtgtgctggggagtccatgggtcgggcttgaatatttcaagagatttttatcatcacctgattttatgaactaccttatgaatacgttaaaggtaagtatttacggattgttatggggatttccggtaccgattatacttgcactgcttctgaatcgtattcgcaaagagggcatcaagaaaaagatacagcttttgatttacgcaccgaattttatttcagttattgtactttgtggtatggttcgtatgtttttatcaccaatcggaccaatgaataagatactcggcataagcacaaactggatgacaatgccggctgcattcaggacaatctacatagcgagcggcatctggcagggagcaggctgggcttcaatcatgtacacagcggcattatccaatgcgagcaaggagcttgaggaggcagcgagaatggatggcgcaaacatcttccagcagatgtggtatgttgagcttccggctattaagaatattatagtgatacagttcatactgcaggcaggaaatattatgagtatcggtttcgagaaagcctatgcgttacagacagatatgaacttaccggcatcggaaattctttctacatatgtatacagaatcggacttttgaatggagactatggttattcaacagcggttggtcttttcaactcggtaatcaacgtaatattgctgattatagtcaatgcggttgtaaagaagctaaacgatggtgaaggaatctaggaggaaagtgcaatggaaaaagatatgacgacaaaaatcaaatattcacggactgataaaattgttcttggaattggatatacacttcttgggttgtttgtgcttgcaataattgttccgttagtatatgtagtgctggcatctttcatggatccgacggtacttaacaaccagggactgagcttcaacataaaggactggactattgatgcatacagacgagttctggaaaatgacatgatatggcgcggattttttaattcgtttttttactcaatagtgtttgcagcaatctcagtatttgtcacaatcctggcagcatatcctatgtctaaaaaggagtttgtcggaagaagatttttcaacgtgatttttattatcacaatgttttttggaggaggaatgattcctacattcatccttataaatcagctccatatggtaaacaccgtctgggcaatcctcattccgggtgctttcaatgtgtggaatatgattttggcgagaacctattatcagtcagtgccaaatgagcttcgtgaggcatcagccatcgacggagcaaatgaaatacagcatttctttaagattatgcttccggtttgtaagccgattattgcggtgcttatgctttggtcatttgtaggaatgtggaacagctactttgatgcaatgatttacctgaatgacgcaaatctccagccattacagcttgtactgcgttcaattctcgtgcagaatacacctcagccaggcatgattgcagatatccagagcacagctgagatggcaaaggttgcagagcagctcaagtacgctacaattgttgtatcaagtttaccacttttgattatgtatccatttttccagaaatattttgataaaggaatcatggttggatctgttaagggctaacagaaaggatgagtatggatatgaaaaaaagaagcttcaaaaaattaattacactttcgcttacacttgcaatgctgacaggtgtggcaggctgtggaaagcagcagagcttaaatgctgagacaaatccggacacaccggtatcagatgtgcagtttcctctgaaggagaaggctgagctgtcatttatcacaagtgcaccggccacatccacacaggatcctaatgagaggactatcttcaagagaatggagaagcagaccaacgtgcatatcgactggacatgcttcgtttcagaccagttctctgacaagaagaatctggcattggcgcagtttggtaatctgccggatggactgtttaatgcaggtatgagtgattacgacctgctcagatatgcaaagcagggtattatcattccggttgagaatctgattgacaaatatatgcctaatcttcaggcagtttttgagaaatatcctgaatataggacaatgtgtaccgcaccggacggacatatctattcatttccttggatagagcagcttggtgcaggaaaagaggcaattcaggcaatcggagatataccttatatcaacaagaaatggcttgattatctgggacttgaggtgccgactactacagacgagctcgagcaggtgcttattgcattcagagatcatgcagacgagcttgagaaagagtttgacattgagggcggtgtcattcctatgtcatttattataaacaacggtgaccaggatccagccatcctcatgaacggctttggtgagggttatggtgatacaggtgaccactttgcagtaacagatgagggaaaagtcatctatactcctacacaggagggctacaaggagggtatcgagtggcttcacaagcttgtcacagaggatttgattgaccctgaggcatttacacaggagtggtcaacatatgtagcaaagggtaaaaaccacagatacgggctctgctttacatgggacattgcaaacattgacaataacacagattacgtcatgcttcctgctctcacaggacctgacggagtcagaaatatcaccagacagaataacagtgagacgagtggtttcgacagaggacgatgcgtactgacatcaagctgcagggatacggctttggcagccgcgtggattgatcagatgtatgctccaatccagtctccacagaataactggggaacatacggtgagaaagattcgttcaatatatttgagatgagtacaaacgctgacggcggacagatgttaaagcatatggatctgggcgatcagtcaccggttgaggtgcgtgaggcgcagtctgtaaacggaccgcttgctgttttaaatgagtactatgatgtttatgtgacagagcctgcagatgccaagtggcgtctcgacaacatgcatgaggcttatctgaaggacatgaacagtaagtatgtctatccaaacgtgttcatgagcatagatgacaccaacaaggtgtcacagtacgacacagacatcaagaaatatgctgagcagaaaaaggccgactggatattaaacggcggcattgataaggaatgggattcataccttaagaaacttgataaatatggtttacaggattatctgaagataaagcagaaatattttgacagctatcagaaatcccttgagagtacgtcagatggcaaataggttactgttcataattctgtattaccggcaaagcaaacagaattggaggatttgaatgagcgaattattggaaaaagcaagaagctacgaggcaaaaaaaatagctgctacagataaagagagtaaacctttgtttcatatcagtgcaccggcaggatggattaatgatccgaatggattttctgtctataacggaaaaattcatctgttttatcagtactatccatatctgcgtgagtggggacctatgcattgggggcatagtacgacaagcgatatgattaaatgggagcagcttccgtgtgttctggcacctgacgaggaatatgataaaaaaggatgtttctcaggaagtgccattgaggcagatggtaagcatgtgcttgtatacacaggtgtcacaaggattaaacttcctgacggcagtgagcaggagagacagaaccagtgcatcgcatttggagacggacttaattatgtgaagcatgagaataatcctgttgtgacaggcgatatgcttcctgaaaactgcagcagaatcgatttccgtgaccctaaaatatggaaagaggatgacacatattatcttatagttggaagcaaggacttaaacaatgtgggacaggtagtgctctgctcttcaaaaaacctgaccgattggcagtttgagacaatccttgcggcaaacagcacaggcaaaataggtaccatgtgggagtgcccggacttctttgggctggaggataagcatgtgctcatctgttcaccgcagagtatgaaggcagacaaatatgagtttcataacggacacaactctgtatattttctgggggattatgataaagaaaatcatgtatttatcaaggaagagccgcacactcttgactatggcatggacttttatgcgccacagactacactgcttccggacggacgccgtgtgatgattgcctggatgaagtcatgggatgcatgtgtcgttcctgattcacaggattggcagggcatgatgacactgcctcgtgagcttgaaataaaagacggccgtatctggcagaagccggttaaggaaatagaaaattatcgtgcaaataagtgtcattatacagataaaaaaatagactgctacacgacctttgatggcataaagggccgcgctctcgacatgacagtggagctttcaggcgaggagtaccatgacttcactgttgaaatggcatgcgatgatgagtatagcacagcgtttacctacaacagagtcgcaggcgtgctcgagattgatcgtacctgctgtggcgtcacaaaggatgtcgtctgtgtcagaaaaattaaaatcgcagatacagacagaaagctaaagcttcgtttcatcatggacagacagtctatagagctctttatcaatgacggacagcaggtcgcaaccacagctatctgtacacctcttcaggcagacggaatctgctttaattgtgacggaagtgctgttgtggatattgaaaaatatgatataatatgatataattttataatatgaaagcatatcagtagagcatacaaataataaccggacaaattattggtccggttatttgtagaataatatacaggatattttgacaggaaagaaagaggtacaatatggatgtagttgcattaggtgaattacttatagattttacagaaaacggtacaagtgcgcaggacaataagctttttgaggctaatccgggtggagctccatgtaacgtgcttgccatgcttcaaaagctcggtcatcagactgctttcatcggaaaagtgggacaggatgcgttcggaaggctgcttgttgatgccgtaaaggagcagggcatcgacacaacaggcgtgcgctatgatgataatgtccataccactcttgcatttgtccagaccgcagcagacggagacagagatttctcattttacagaaatccgggagcagatatgatgctgacagcggatgaggtggatttatcccttgtgagaaacgcaaaaattttccacttcggaagtctttcaatgacagataagatctgtgagaatgcgacaaagcatgcaatagctgccgcaaaagaggcaggcgtactgatttcctttgaccctaatctgcgcaaaccgctctggaagagcatggacgatgcaaaagagaagataagctggggcctgagtcagtgtgacatcttaaaaatatctgatgatgagattgaattcatgacaggcgaaaaggacataaagacaggtgtgaagaagctcatagatgagtatcacattccgtttatctgtgccaccatgggcaaaaacggaagtatggcattttttgacggacatatcgtggaggcagctccgttcctgcgagatgacactgtcgagactacaggtgcaggagataccttctgtgcgtgcctgcttcacgatgtgctggagcatggtatcaatgaccggaaggatgacgatgtgaaaaagatgctcacattcgcaaatgcagcagcttcgcttattaccacgagaaagggcgcacttcgcgtgatgcctgagaagggtgaggttgaggctgtaattaagtagttataatttaatacgacaaaagagattatactcttcttaatctatgtttaaaaacgtgattaagaagagtatatttgtttcttgcagtgcataattgtattggctataatatcatatataaaacaatgatttgagactatacagggagtcagatatggtaaaaacgattggtattgggaaacaggattttgcttctgttatagaagataattgcttttttgtggacaaaacgagctttataaaggaatggtgggattcaaaggatgatgtgactctcatcacgcgtccgaggcgttttggaaaaacacttaatatgagcatgcttaactgctttttttcaaatcagtataaggacaggagcgatttgtttgattcattgtctatatgggaggatgaggactatcgaaaaattcagggtacttatcctgtgatttttatgagctttgcttcggttaaggccgacaatctgggagatgcaaaaatccagataaaagcacagatagaggctgtttacaaaaggcacagatatctgcttgagggggatactctgacagcagacgaaatagctgattttgaaggaacaaataccaggatgggtgatgctgagagtggattaaaattaaatattttgtgtgagtattttcatcgttactggggaaagaagacgataattatccttgatgagtatgatactcctatacaggaggcatatcttcatggatattggaatgagtttactgcatatataagaagcctgtttaatgcaacgttcaagacaaatccgtatatggagcgtgctattatgacaggaatcacgcgtgtatcaaaggaatcaattttttcagacctcaataatctgaatgtaataaccacgacctcaagcagttatgcaacgagctttggatttacagagaatgaagtttttgatgcaatggaagagtatggtctgtccggtgaaaaagatactgtaaaaaaatggtatgacggttttaaatttggaaatcacagtgatatttataatccatggtctataacgaattttctaaaggaaaaacagataagtccatactgggcatctaccagctcaaacggtctggtaaatcgtttgatcagaacagcatctgcagaaataaaatctatgatggaaacacttctggaaggcgattctgtggaggttagcattgacgaacaactggtgtttgaacagctcgataacgatgaaaatgccatttggagtcttttgcttgccagcggttatttaaaggttgattccttagaaaaaagaggtcttacgcttgaaccgtggtatcatctgagcattacaaatcttgaaaccgtaagtatgttttcaaatatgttcagaggatggtttaatgcctctgtttcgaattataatggattcataagggcattgcttagaggcaatgtaaaggaaatgaacatatacatgaatgaggtcgctttatctaccttcagcagctttgacagcggaaagcatccttcgggaaaatctgaaccggagagattttatcatggttttgtcttaggcctgctggtcgagcttagagataaatatgaagtgcagtcaaaccgtgaaagtggctatggcagatatgatgtgatgatcattccacgtgataaaaattcgcaggctgtaataatagaatttaaggttattgattcgcaagaggagacatcactggatatgactgcggatagtgctttgaagcagattgaagagaaaaattatgatgcaaagcttttggaacgaggatataaaagagaagcaattcaacattatggtttcgcatttgaaggaaagaaagtattgataaagaaggcacaaatctaaatgaaacaaaaattatcagttgcaccaacactcaaaaactacgacaagaaaaatctcccaaaggacattcttgcgggaatcatcatcatggcggtttcgattcctatatcgatgggctatgcgcagatatccgggctaccggcggtatatggcttgtatggctcggtattcccaataatattgtttgctctgttttccacatcaccgcagtttatattcggtgtggatgctgctccggcggcgcttgtcggagcagcagtgcttggcatgggaatagaggcaggaagcaaagaggccatgacggttgtaccggtgtttacattttttgtggcactgtggcttttggcattttacttcatgaatgccggaaagctggtgaactacatatctgcgccggttatgggcggatttatcacaggcatatgtactacaatcatactgatgcaggcgccaaagctcatgggctctgcggcaggaaccggagagctttttgaactgtctgagcatatatgggaggccttacaccacataaatgcagccgcacttgtcatggggattgtagcgcttgccattttggttgtgagtaagaggcttgttccaaagtttcctatggcggttgtgctcatggtaacaggcgcgctttttacatattttggaccggtaaaggagtggggagtgccgactctttcagcagttgagcccggcatgccgcggtggtatataccggatttcgaggcagttttttcagttcaaaaggcctcagaggtaatagttttaagtctttcggttgctgttgtcatcatggcagagacacttctggcagaaaacaatttcgcacagaaaaacggatacagaatagatgataacacggagcttttggcattttccataggaaatatggctgcggcttttacgggctgctgtccgataaacggttcagtgtcacgaactgcgatgagcgagcagtacgagggtaagacacagctcacagggcttgttgcaggcgtttccatgatagcagtgcttcttttttgcacaggctttataggatatctgccggttccggtgctcacggcgattgtcatatcagcgctcatgggtgccacggagtttcatctggcaaagagactgtggaaggtcagcaggacagaatttttcatatttgttggtgcttttttcggagtacttattctgggtacgataaacggagttttgataggaatcattttgtcttttgccgagatgataatcagaagcgcaaagccggccacctgctttctcggtgtgcagccgggacacagtcatttccgcgatatcagggagagcacaaacatccacgagattgacggtgtgattatttacagattttcgagcggcctgttttttgcaaatgcaaaggtacttgtgcgtgatattgaggaccacctaaagcatgatacaaaagctgtcataatcgatgccggagctatcggaagtattgatatcacaggagctgacagcatagagtcactttaccgctcactgaaacaaaaaggtgtaaagctatacataacagagcacattgcagagctcaacgagcaactcaggaagctgggcttaggttatttaattgagcagggctgtgtcagaaggacaatacatattgcgctaaaggatatgggaataaacagaccttatccgcttgagggtggcgtagataacgaggagcgcagtgcctcaagaaagcgtgctgacaacagagtgcaggagtttgtctgggcgtttggcgccgagagtgaggagcagattgaaaagcagataaagcttcagatagaacagctcaaaaagacaaaggatatagaggaaatcatgcatggccgctgggcgcatatggatgagtttgaccaggatgagtggctggagcatctggaggagcatctgaaagaaatcgtcaacatatcaggaaaggatgtgcacacgcttgcggcagatatcgagatgcaccgtcgcgaggtgcatgagcgtatagcaagagagcatccggagcttgcagagcggtttgcacagaggagacacctgcttgataagcatctgaaggagagaaggcctgaggtctacaggattatcgtgcagctaagggaggacaacaagcataaatgaacataaaccagacactcaaacaatactttggctacgacagtcttagaacagggcaggaggagctcataaacggcatacttgcagggcacgatgtgctcggtatcatgccgacaggcgcaggaaaatcgctgtgctaccagcttccggcgcttatgcttaaaggaattacgcttgtcatttcgccacttatctcgcttatgtcagatcaggtcaaggctttaaaccaggcaggagtgcatgccgcctatatcaacagctcactgaccgaaaaccagataaggatggcactttcgtatgcctcacaggggcgatacaagataatctatgtcgctccggagcgcctcaacacgccgcgttttctggattttgcctgcaacgcggacatatcgatgctgacagttgatgaggcacactgtatatcgcagtggggacaggatttcagaccgagctatctggaaattgccggatttttaaagagacttccaagacgaccgatagtcagtgtgtttacagcgaccgccacggagcgcgtgaaaaatgatatagtggcttcgcttggacttaacaatccggttactatggtgactgggtttgacagacctaacctgtttttcagggttgttacaagaaagggaggcagccagaaggacaacagtataatcaattatgtgaaaaagcatgaggacgaaagtggaataatatactgcgcaacgaaaaagaatgtggataagctgtatactcttttaaatgagcagggtatttcggcgggccgttaccacgcagggctttcaaatgatgaacgtaagcagaatcaggaggattttacatacgacagaatccgtgtgatggttgccacaaacgcatttggaatgggaatcgacaagtcaaatgtgagatatgtgctgcattacaacatgccacagagcctcgagtattactatcaggaggccggaagagcgggacgagacggtgaggaagcggaatgtgtgctgtttttctcaaagcaggatatcatgataaacaagttccttctgcagaataaggcttcagcaggcgatgtggcatccgatatgcaaaagacagccaatgacaggaggaagctgcagcagatgataaattactgtgagacggacaaatgcctgagagagtttatactttcatatttcggagatacaacgccatgcatctgcaacaaatgcagcaactgtgtggttgtggaggatgaagaggaggagacatacgttgaaaccggcaaaaagcgtaaaaaggcagcacagcttgcagggcttaacgagcttggtgctgcgctgtttgaaaagctgcgcagcgtgcgtacagagctggctgcagaaaagtcggtgcctccgtatatcatctgttccgacaagactttaaaggatatatgtgcgaagctgccgcgggataaggaacagcttgccgatgtgtacggcatgggtgagcagaagatacaaaattatggtgaagcgtttgtgacggcggtaaattcatttgttgcagataacccaaatccatcaggcagcacgacaggtgaaagaccacagactgttttaagcgatgaggaggctgctgaaaccggcagcacgagaaaaaagaagcttccgttttacatcgagccacagaggcttgatgaggtagagctcaccgacaaatgcaggcttacagagcttacgaacaaaataaatgagctgtgtcctgcggataaggagcacaaaaagcttgcagcctcgtttataaacgagcttcttattgcagagggatatctggaggaagttacagaagacgggaacaagataaagcgtgtcaccgaaaagggacgaagcgtagggatagatgaggaagagcgcaaggcaaaatttggtggaagctattacgctatcacccattcgaagcagagccagcaggtgataatagaaatgctgaaaaaacactatagcggaattaaaccataggtgtaaatggactttagataaactggatatataaatttatataaaattggatatatacttgatgccacataagagtattatatagtttaattgtaatatttaggaggcattttatgagaaacgaaaaagttcaaaaactcacacttacagcacttatggcagctttatcatatgtcatattcacatttttacagattaaggtcacattaccgggtggcagcgccacatcctttcaccttggcaacgcagtcgtagtacttgcagctttgctcttaggcggagtatatggaggaatcggtggagcaatcggaatgacaatcggtgatttacttgacccgatatatatcaccggagcaccaaagacatttttcctcaagcttatgattggtgttatcaccggtcttgtagcacacaagcttggaaagattacatattcaaccgacaagaagcatgtatttaaatggacagtccttgcagcatgtgcaggaatgctcttcaactttatttttgacccgattataagctatttctacgatatgcttatcctcggaaagccgatggcacagctcaaaatcgcatggagcgtgaccacaacaggagtcaatgcagtgatatcggtgattgctgcaacaatcgtgtatgtggcactgagaccggtgctcatcaaggcaaatctgtttttcaagattggcaaagaaaaataatagttacataatatttagcattaaaacctgattatgatgagacgagatgaaaatacaaatatattcgacagagtagctgaaataagtttataccatcggtttcttcgttacaagctgacgtgtgaatactaatggacaaaatataatcaatatataatcaatatataatactgcagttgacatagcttgttaattgtcatattataattatagagaggtctccattaaccttatggtcttgaatcgtagaagagatgaacattaaagaaggtctccattaaccttcggtaatcaatccgtaaagagatgagcattaacgagtgggaagcttaggcttcccacatttttaatctaaaatataaaggagcagtattatgtttatactagagggaaagttgacatttatcaacattgaacaaagttacctcaaaaagctgcatgatgcatgctcagaggtgtattacaagccaagcggttatgagaataaaccatacatagggattttgataaacaaaaatgacagaaaatatgtaattccattatcctcagcgaaagagaagcataagacatggaaaaatgtcaagaaatataaggatttgctaaataaagaatattctttttgcttgaaggtaattgatgaagttatcggaagggctaacaagttgtacgacaaacagatggcaaccggaaaggtggttaagttctgttgtgattttaaggcattagaagaagtggcagataaatagtggcggatggctcgcatgagccatccgtttacaactatatagagggaggtatttagtgtcgtgcagttgtcatattttatgatttaactgccgcaacaaaatcatgtatcttttccggattcttccccgctttgtcatcattttccacacctgatgatacatcgactccgtcaggatgcacggcttcaattgccatgcgcacattgtctggatttaagccacctgcgagcagcagcagcttttcatcgcgggggatattgtcaaccagcttccagtcaaaggtttttccactgccgggttcgatggcatcaaacacatagcctgcgatgcgtgaatcgttgtgatacttttcatagctgtccatatcagagacattgaaggctttaagaatcgggatagcttttgctgcctccgcctctgtctccggaatttccccatgtatctggacatagtcaaagcctgcagcctcaatctgccttatctgctctatggatggcgaaacgacaaccgcaacccttttgatggaagcatcaagggctgccataatatcctttgcctgttcgatggatatattcctcttactctttggaaaaaataacaccatacccgcaaaatcaacgtgattttcgttgagataccgtgcttcagcaggtgaagtcagaccgcagatttttattttggtgctggaatttgtatctaaatttatttttgtatttatatctttattattatatatattctgtgtattcatatcctaagaatagcattgttgcaggttgatcgcaagtggatatattttaaattattgagcattaattgcaagtggatttacgttaaattattgagtatagttcgcaagccgcgggtaccctggagcacacactatcccgcgaaagcgaatagcggagctgcttagagactgtagaattgtgctatgcaaagcagaaatgccgaggcatggacgccgaggcaaggagaaatcgagccatggatggcgagtttcgacggtttcgtcgagttaagaaaaccttgggcacaattcgtacagcctcttagctgcgtagcgtagcgaacgtgggatagtgtgtgcaccatggtacccgcggtttgcgaacaggtgtactactacaaacaactacaaacaacggttaatacggattgcatgcgcaaaaatgagatgttataatgcagttaataaacagtaataaagcaggagataacaattatgtcaacagaaaagataaaagaatatatcggaacacagctcaaagcactcacatcaatagcaagccctacaggcttcacaaaaaatgccacagactatctgatgaagcagctagaggctatgggatatgcgccacagctttcaaataaaggaaatgtcagcgtggaaattggtggagttggagcacatttggtattggcagcgcatgtggacacacttggagccatggttcgctcaataaaggataacggacgtttgcgcccgacaactatcggtggtcatcagtggagcacagcagatggagaaaactgcatggtttttacgcgtgatggcagaatgtacacaggcgtggtgctaaatacagagccatcggcacatgtggcagatgaaaaggttgagacaaaggaagagaatatggaaatcctgctcgatgaaaatgtaaatgacaagcagggcgtagcggcacttggcatccagacaggggatattatcgccatggatccacgtacggtcatcacggagagcggctatatcaagagccgtttccttgatgataagctgtcagccgccatcttactcggtgtggctcatgccgtaaaggatgagggctggaagctaaaccgcaaggtcacactgctctttacggtttatgaggaggtaggtcatggcggaagctttgtaccggctgatacggaggagatgatttccgtagacatgggctgtgttggagccgacctcggctgtacggagcatatggtttcaatctgtgctaaggactcaggcggaccttacaactatgagcttgtcacagagctttcaaatctggcaaagagcgaggggcttgactatgcaatcgatgtttatccgcactatggctcagatgtcgaggctacactgcacagcggatatgatatccgccatggccttatcggtgcaggagtttatgcatcgcataactatgagcgctcacatatggatggcgtggagaatacttataagcttttgaaaaaatatattacagaatagtatcattgtgatacattatttcatgtattcaaacaaagaaggagagaggtaaatacaccatgaatttaaaaaaagttcatcatattgccattattgggagcaactatgagaaatcaaagcacttttatgcggatctgttaggtttttctattattcgagaaaattacagaccggaacgtgatgattataaaattgatcttcaactcgatgagatagaattagaactttttatcattaaaaattgtccgaagcgtccaagttatccggaggcttacggtctcaggcatcttgcctttgctgtagactcggtcgatgatactgtaagagaattgaataaaatgggcatcataactgagccgattagactcgatacttacacaggcaaaaaaatgacattctttcatgatcctgacaatctacccttggaaattcacgaataaagaataacaattcgaaagttacggaggaaacataatggaatacagaaaatttgataatataataatagcgagaattgacaaaggggaggagattttggagcaactgaaagcaattgccataactgagaatataaagcttgccagtattaatgctcttggagctatcaatgatttcacagtcggagtatacaagacagatgagaagaaatattactcaaacagttttaagggatattatgaaattacatcgctgacaggtacaatcaatacaatggatggagaatattatgcacatcttcatttgagtgccggtgatgaaaaaggtgaagtgtttggaggacatctgaacagagctgttgtgagtgcaacttgcgagctcgttattacggtaattgatggaaaagttgatagagtttatgatgaagaaacaggacttaatgtattcaatttctgaacactttttggtttttcataatagtatctacaactgttgttatttttatttgtggtcgatattattttgcacacaataaaagctataaaaatgaggcaattgattatgcaaaatgggagaactttgcaaaagtaattaaaagagcaatgatcgcatgtgaaaacagcggacacagtattccagacgattttcctgaagtcaggaaaatcgttgaagctggagtcaccacgaaccccaaaaaagattatgaactgtcaagatatgcatgttatctgatcgttcagaatggagatccaagaaaagaggtcattgcattaggacagacttattttgcaatccagacatacaggcaggaggttgctgaccattttaatgaactggacgaagataacagaagacttgttgtcaggggagacatcaaacagtggaatcaaatgttggcagagacagcacataatgcaggagttattacgaatgaggaatttgcgatttttcaaaatgccggatatatgggactatatggtggattagaggttgaaggtattttggcagcagtttatcagagtgtgtttggtggagatgtatatctgtcattagaggaaaaagtagctaatttattatttaatgaaattggtaactcgcaagttgtttaatggagaatgtatgaagaagagaataacgcttattgttttttcgatgctaataattgttgctttatatgtgttgtattgttttaattatattccacataaaaaatatacaaatgcagatttcaatatagaagcttacaagagcaatattgataaagacaatgatggcatagatgaccaaacagatatattaaataatgcaaataattacataaaaactaatccaaaatataaaagcaaatattacaacacaggttatccagatgatgaatatggggtttgtactgatgtagtagcttttgctttaaaagatgcaggatatgatttgatggtattagtaaatgaggatataaaaaacaataaagaattatatgatatagatgccgttgataaaaatatagattttagaagagttaaaaacttaaaagtatatttcgataataatgcaataagtcttactacagatataaatgaaatagaagaatggcaaggtggagatattgttgtatttaaaaaacatatcggcattatatctgacaagagaaatcgaaaaggtatatgttttgttattcatcatgcaaacccatatcaaatatattatgaagaggatatactggaacatcgtgatgatatcataggacattatagaatcagttaaacaactcccagtttttgaaactgagaaatcggaatttgctaaaggagatggtaaatatgtggtggtctattggtggtggaatcataatctttgcgttaggtatgtttatcttcttaaagccgggcttaatatggaaattaacagaagaatggaaatcttatcgtgcagatgaaccatctgagttttacttgaaaacaacaaaaataggtggtattctatttgccctatttggaattattatgattatgcttccggttattttggagtaataaattcaagtttgcagaactgaccaaaaatacaaacagttcgtaaaagcatatttttacgaactgtttttttgcgtatttacggctttctttttctcaataataaaataggtaatggcaattcttaccagtatttgatattgtaaagttaccacacaaaacaattcaatacagaaagacaccaccgcccatgaaaagactaccatttgaacgcttttctgacaagcggttttattatgctaatgcacctccatgtaagcaggggggttcattaactactgatatttcaccctgcttattcttgtagtaaccaatcggctatatcgtgaatttcgattccttcataactatattggggatgtttggttctggcaataatcattttcggataagcatctcgaacctgaagcagaggagagtgttctctctcaaatgtttcctgcccggaaatgttgtcgctgacctgaatataaatcttctcgctgcctctctgagcaacaaagtcgattttcttttgatagagcttgccgacataaacatcgtatccacggcgaagaagctcgatgcaaacgatgttttcatatagtcgtccgctttcaaaaacacaattattaactcgactttttgacaggcagtgtatcaacaataatctttccgatatatcaatataaatataattgagttattaaaaagatgttatattagtcgaatttcgaatgatcaattctgtttcatattgacagaaaacatgagggcaattaggatgctgaattctttcaagaatttgtcttgcagcagcaatacctagatatttctgaggagtgcttatggttgtcaatgacggtgaaattctggaagcagcagggatgttatcaaatccaacaacacatatatctttgggaatctggaaaccaaggaactgcagtgcgtatatcaactggatagcagtccagtcatttccgcagatgaatacatctggcagtgatatcatagcttgcaaattattaactgtggtctgaaaattccgaaaatcctccggcgtttgatgaagaaggcaattcttctgattaagtggaagctgatgttcagcaagacactcggataaggcattataacgttcctggaatccacggcttacattaggggaatagaggtctccaacaaaaccaaagctttcagctcctttttctataagttgattaattattttttttagattctttttactttccattgtgactacatctattccatttagttcttcaaacggaacatttggcatatctacagatacaattggaagattaaattgtgagagggcatcgcatacaactttatcacagatctcaacaagaataattcctttgatagaagaatcggaaatagtttgtgggaaattgagttgttttagatcactgtcggacatgatactgattgccagatgataattcgcatttgaaagaatcgattcaattcctcgtaaaacggtggtccaaaattcggagtcggaagcgtaagttctggtaaggaaaagaatcgtcccattgctgcctgtttcggaggcaggtatgacaggggtggcgaaagtggcatttttataaccaagcttagaagcggtctttataaccagatttcttgtattttcagatacctcagaactgttttttaaggcttttgaaacagtatttctggaaagccccagatgatcagcaatattttgaatggtacatttcatagtaaactccttttatattgtatttatatgctttagatatagtataacacaaaatgcacgaattgcaaacaatacaacgtaaaaataaaatgcacaaaatgcacggaaaaagaagagaataatataaataatgcacaaaaaatgtgaggctaaaatatagaaaagagggaaaaggagaaaatactgtgcaaaaacttgaaacaatgcaaagaatatgataatgtaaatgcatgaaacgaaatgtgcaaatggtgcaaaaggagggtaaaaatgaggcaattattttataaacaaaaggagggtaaaaatggggcgattattttataaaccagaaaatgcctgggttggtgatttgattccatattatgaaaacggaacctattatggattttatcttcatgatccaagaatacgtgataaagaatatgccgaagatactacatggcatctgattgagaccaaagattttgttaatctggattataaaggtgaatcaattgcaagaggtggtattcatgatgccaacaagaacgcatatacaggatcggttatcaaatgtgaaaaagatggattgtatcatgttttttataccgcttataatgaggattttaaacttcgcggtaaaacaattcaatctgtaatgcaggccacagggaaaaatctggaaaatttggagacagtaaaagattttttgtttgtctcagatggaaaacagtatgaagagtttgactggagagacccttttgttttttggaatgacgaagaccaatgctattatatgctgttggcgtcaagagtgacgaacagaggagatctcaggggtggatgcattgcattgtgtaagtccgaagatttaataaactggacttatgagaaacctttttatgatccgaaaatgtatattactatggaatgtcctgaactgtttaaaatgggcgaatattggtatctggtattttcaacattttcagatcagtttacaacacattatcgtatttcgaaaaactggaatggcccatgggaaatacctgatgatgatgtttttgatacaagagctgattatgcaatcaagactgcttctgatggcaaaagacgatttgctttcggatggatagcgagcaaatatggaaatactgattttggtccatgggaatggggcggaacaatgaattttcatgaaataattcagaattcgaaaaacggagaacttagaattaaagctattccggaagtgctggattatttttcgaaagagattgaattgaaaaaagaaactttatataactgcaagatggtacaggcgcaggatggagtcagcgttgaaagtgatacgctgggggctcttttatatcctttagaaggtgatacttttgcgttggatatggtaataaagcctgagagataccatgaatttggaattgcgttacatgtggataaagaactcgaaacgggttatttcttacgtatgaaccctaaaaatcaattagttgcatgggatatgtggccaagaggagaacagggaagatatcagtggcagataaagggagatgttccttatcagatagaaactgcaagaaaactgccaaaagcggaagaatatcgagttcacatcataaaagaaaaagatatctgcgtagtgtatattaatgatgaaattgttctttcgaccaggatgtataatcataaagatggttatgcaggtatttatgtagtacaaggcaatgtaaaattaattcaatataaagaaaaaaggagcgagtaatatgaggaaaaagataattagtgctatgttggcattgtgtatggctggtagcttattaacaggatgtgggacgtctgctgatgcaggaaagaaaagtaaagacagcggggacgttactaccgtaaaatggtttacgtcaagaccggttgacggagcaattgatcaggtaatgcatgaaatcgcagatgaatacagtgagaagatgggtggaaaatggaagattgaatttgaaactacagctgatagaccatcatatttgcagaaactgaaaacattgattgcaggtggaaatatgccggatatcattgatattgacgcagatccgtattgccaggaactggttgatgcaggaatgcttgtagatgtaaaaaaattcctgaaggataatggtaaatatgatagtttttatccgactgctctgaaatatcaggaatttacagacggatccatgtatacacttccattggaatatcatgttgaaatgacctggtataataaggaaatttttgacaaatatggtttatcagtaccgaaaactatggatgagtggctggatgtatgtaaaacgttgaaggaaaatggagtaacaccaatttcagtagatggtgttgacagatggccggtacagagatatctggcaatgatgccgtttagagaatctggtaacgattatattatcaatcttcgtgatggaaaagaaaaaatggccggagatgaaggtaaagaggcagcaacattcatgaagaatatgggacagtattttaatgatggatttgcagcaacggattatgcaactgcacagtcgatgttcctggatggaaaatccgcaatgtactacattggtgattgggagattgcagctatgcaggacgcttataaagctggaaaaatagattatttctatcttccaactatcgaaaacggaaaaacagatgcaagtgaattttgcgtaaactctggaatcggaatggcattcaatgcaaaaacatttgatgcaaaaaccaaagactttatactttacgtactggataactatggtaaaaaatatgcagcaaaacagcagatgtcaccaatcaaaacagaacttccgtcagatgtagaattctcagatctgtatcttagaattcgtgatgatatggataaaacaggtgcgcagttcctgaaaccatgggatacatatctggatgcagatactaatacaactatgcaggataatttattgcttcttgcatccggggatatgtcagttgatgatttctgcaaactgatagatgattctattgcaaccaacgcgaaaaactaaggatgtttgatgtctgggagaagactctcccagacatcctgtatttaaaaccatggaggacaatatgggcgtaattaagaacaaaaaatggttttttatatttttattacctggactgttattttatattttgtcagttttttatccaattgaagagtctattaggctaagctttatggaatggaacggaattggtgataaaacttttgcaggtctgcaaaattatgttacaatgtttcatgatccaacattttataaatcatttttaaacaatctgatttatcttcttattgtggtagttatgcagcttggaatcggacttgtttttgctgtattactgacttttatgaaaaaacatgtgacatttgttaagactttatactatgttccttgtattatcacaactgtagctatcgcacagctgttcagaagtatgtatgcaacagaacctatggggctgataaatcagttttttcaggctataggaatggaaggaatggttacttcctggctggcaaatattcacactgcacttatggcagtgtcagtgccagaaggctggagatttacaggaatgtatatggttattttttatgcagcgttaatttcgcttgatccatctgtatacgaagcagcaaaagtcgatggtgcaacagatttccaaattctgttaaaaataaaacttccattgattaaggatattattcttctgactcttactatgtgtttgacaggtgcgctgagaggatttgatattccatttcttcttacaagtggaggaccgggaaatgcaagcgagctgctctctacatacatgtataagaaagcattttccaataaccaatatggttatggtagtgctctggcagtgtttatcattattgaaagtatgttggtggtatttatacttcgtaaaatattttcagagcggaaggagtgtaaagaatcatgaaaaagaaaattggaaaaattgtatttgcgatagttattcttgcctttctgcttattcaggtttatcctataatatggctttttatggcaagtgttaagccgacgatagaattgtctacaacgccgtttgctttgccgaaagtggtgacatttgaaaactttataaaggtattttcagatggaaaaataggcatttatatgtggaatagtttaaaagtaacgggaatctcactgattctgattatttttctcagttcgacagtaggctatgcattgtcaaaattcagaatacgtggaaaaaaacaaatttataaattttttacgttcggaatcatggtgccagtacagattacattgattccactgtttattttctatagtaaaatgggaatcttgaatacaagtttttcactgattttaccacaggttggatttgctcttcctctggctgtgatgatgtttgtaagtttctatgattttgttccggatgagctggttgaggcggctattgtagatggatgtaatccaggtgttacatttataaaaattgtgtttccattggcacgaaatacaataattacaattgcatccatgtatagtattcttatatggaatgattttatttttgcaaatacatttatcagtgacagtaatgcaaaaacagttgcaatgggattgaaggattatgtgggagcatttggtaatgtagactggggtttaacatttgcagctatcgttatatctatacttccaccacttattatttattttgcacttaataaatgggttactgcaggtatgacaatgggagcaactaaaggttgataaatagaatgatattaggaggatatgaaatgatatttccgggagatatctcaaagatgccctatctgacacatgggaaaagcagagcaattaatgctgagaacaggacaggagaaaaaggaaaaggcgggatggcagccagcccgcttggaccttcacgtaagggaagcccgtgtttgaataatattcaaccggggcaggaagaatttttggcagatattgagggaccaggtgtgatccagcatatatggataactgttgacagtaagacctcggaaggtgactgttttgtactgagggatctgattatgcgaatgtactgggatggagaagagaatccgtcggtagaagtgccattgggtgatttcttctgttgtggatttggacaggaatgtattgtgaattctgctattataactgttgttccatcacgaggacttaattcttattttgcaatgccatttcataaacatgctcgcattactattgagaatcagcataaaaatccaataccggcctttttttatcagattgattactgcctgtatgattcgcttccagaagacacttcttattttcatgctcagtggagaaggcaggcaattactgaaattggaaaagattatgttattcttgataatgtaaaaggaagtggccattatgtaggtacttatctgggactttcagctttgcagaggtactggtggggagagggtgaagttaaattctacattgatggagatgaaaaatatccaacaatatgtggaacaggaatggaagactatttcggaggttcctggagtttcgcatcaaatgaaaatggcagaattgtagaacagaattattctaccccatatttgggatatccattttattccagacatgattcacttgtttggaatcaatatcataatgatgattgtccgccaatgcgtggattttacagatggcatatccctgatcctgtattttttgaggaaaatctgaaagtaacggtacagcaaataggggttagtcataatggattgtttgagcgacaagatgatctttcaagtgtggcatactggtatcagagtgaacctcatcagaagtttaaagaactactaccggtagagaagagatggccaagataaatgttataggaaaagtcctgcattactttttacgagtgaggcgggacttttgtgagtgttatttgatcggttcaaaatcaacagcgagagtgtaatataaagtgcggtatctttaagaaagaagtttcaggattaaatatggcagaaataaagaactcggaatcagatatgagcactcagcagaaagctgagcaggactgattcaacattgctgctgtgaattgagattccaaagcgtttttgaaggatatacatttgacaaattacagatttactttcagctacgatggcacccgctatcacggctgggagagccaataaaagttataaaaaagatgaaacagactgataacttcaagtttgcagaatttgaccaaaataaaaccagttcgtaaaatgacatttttacgaactggtttttgcgttgcattttcaaataatatttatctattttgtaattaaccaaaatatctgtcaagaagtcccttaagggctcttccgtgtctagcctcgtcacgagccatctcatgaactgtatcatggattgcatcaaggttgttcttcttagcacatttagcaaggtcagtctttcctgctgtagcaccgaactcacagtcaactctccaagcgaggttgtcctttgtagtagccttcatgttaggctcaaggtcctcaccgagcatctctgcaaacttagctgcatgctcagcctcttcgtaagctgccttctcccagtagagaccaatctcaggatatccctcgcgatgagctacacgagccatgcaaagatacatacctacctcagagcactcgccctcgaagttagcctttaactgctcgaagatgtatttcttatcttcatcagagatttcaggattgttcttaacagttgaagcgtatactccaaactcatgctctgcagcaagtgttaaatctccctcaaccttcttgaatttatctgcgccaacgtggcataccggacactctgccggtggattctctccctcataaacgtatccacaaactgtacaaacccattttgccataataatgttcctccttttaaagatagtaaataaatgtttaattgttgtaaaaattgtcaggctctaggaaagctcatttttgcaatccggacaaagtcccgtaaacgaaactgagcagctctcaatggctaaatcagtggattcctgcacctgtgtcatcagctcatcggcgaagtccaaatcgatatccatcacgcgtccgcagcttctgcatataaagtgataatgaggcgctgtgttgtagtcgtaatggtcaggaccgactccggtcgaaatcttgatgatctcatcaatttcctcaagcaaggaaaggtttctgtaaacagttccaagactgatgtttggaaattcttttttgatattctgatagatagtttcagcagtcggatgatcggtccggctcgccagaaagttgactatcgactctctttgacgactatacttaatcatatgaatctcctctcaaatgaaatcaggaattgttactgatatcaatatacacgacagtactataattgtcaagagaaaaataagaataattcctattttattttctcgagatggctcgaatagctataaatcaagtataaattaataacacgcataatatcactgcttcactcatagaatagtacaaaacgcgcaggcgggtaaataagcatgaagagattcgttacatacctgtatttatatgatggcagaataaaaggaaataatgcaggctttataaaagtagaaataaacggagaaaaaagtgcatttctcgtacagataaaaaatctcggaaaatactccggaaaaggaaaagtgtatctggtatatggagcggaagaatccatagaggcaggagagcttacggtaaaaaacggtgaagcgcgagagatatataatgtagataccgaaaacgtaaaggacagtggaaagacatttttgcaggtgctcggtgtaaaaatagagctggaaaatgcagatgaaaaatttctggcaagctgctggacggataacacggaagcagttataggaaaaccaatcaaggtacaagcagatttatcaaataaggaaacccctgtatcgactcctaagcctgaaccgggctgccagaaagaaatccatagtcaaaatgttgatgacagtcaggacaaaatcaggcgtatagacatatcagagcttcgcacgcttccggccaaaaactggtacatagtcaacaacagttttcttacacacggttacgcaaactataagcatctcgtcatcaaaacggacacggatggcaggcaatatctcggagtgccgggcgtgagcgagccgcaggagcgcatgctggcagggatattcggcttcacggaatttgagccggccgccccggcaaatgcagcggatgtcgatagcggagtgttcggatactggttctgcccgctgtagtttttatagattgtaagaaaatgtcctttcctctgcacaaaaccacagaaattgtgtataattaaagctaacaaaagaaaactgtgggaggtggcattacatgaaaaattattcaaaggatcctgacagacagtatcatatccaggtcgcaaagggagaggtcggcaggtatgttatcatgccgggagacccgaagaggtgtgttaaaatagctcagtaccttgacaatccggtcttgatagctgacaacagggagtttatcacatacaccggcacattggatggagtgaaggtcagtgtgacatcgacaggcatcggcggaccatccgcatccatcgcgatggaggagctgtacagatgcggtgcagataccttcgtgaggatcggaacctgcggaggcatgcagacagatgtgaaaagcggtgacatcgtgattgcgacaggcgccatccgcatggagggcacatcaaaggagtatgcgccgatagagtttccggctgtggcagatttagatgtcacaaacgcgcttgttgcggcagcaaagcagaaaaactttacgcatcacacaggcgtggtgcagtgtaaggatgcattttacggacagcacgagcctgaaaaaatgccggcaggctacgagcttatcaataaatggaatgcatggaagatgcttggctgtcttgcgtcagagatggagtcagccgcgctttttgtcgttgcggcaaagcttggagtcagggcaggttcatgcttccttgtggtcgcaaatcaggagagggaaaagctcgggcttgagaatcctgtggtacgcgatacggacatggcggttcaggtggcggtttcggcagtgcgaaacctcattcgtgaggattgcgccggagaataagtcagacataaaacacagaaacggagaacagacattggatataaatgaaattttaaaacacgttgaccatacacttttatccccacaggctacatgggacgaaatcaggcagatatgcgatgatgcgataaaatatcacacagcatcggtctgcataccgccgagctatgtaagtcaggcgtcaaagtatctgggtgaaaaggtaaaggtctgtacagtgataggcttccctaacggatattcgaccactgcggtgaaagcctttgagacagaggatgcccttgcaaacggagcgaaggagatagatatggtcatcaatatcggctggctcaaggataaaaggtatgagctgatagaggatgaaataaagaagctcaagtccatatgcaaggataaggtgcttaaagtcatcatcgagacctgctttctcacagatgatgagaaaatcaggatgtgcgatatcgtgacgagcgcaggggctgattatatcaagacatccacaggttttggcacggcaggtgcgacctttgatgatataaagctgttttcagagcatatcggagagggtgtgaagatgaaggctgccggaggcatttcttcattagatgatgcagaaagatttcttgagcttggcgctgacaggcttgggacaagccgtgtggtgaagcttattaaggctatggactgaattttcgtatacaataaataaccggggaattatatatggataaaaaaacaattgaaaaactgattgatacagcccttgcacagcttgacttttcatatgcgccgtactcaggcttcaatgtaggtgcagctcttttagcaaaaaatcaggcagtctacaccggctgcaatatagaaaatgcagcctacacaccgacaaactgtgcggaaaggacagcatttttcaaggcagtgagtgaaggcgtgcgggattttgaggcaatctgtatcgtgggcggaaagaaccaaaaaccgacaggttatacagcgccatgtggagtatgccgccaggttatgatggagttttgcaatccgaagacctttaaaataatactggcaattgacagggaaaactataggatttacacacttgaggatatgcttccgcaggggttcggacctgcgaaccttgagtagagtgacctgtagctgtacctttaaggggctgtataatgggctgtaatagttgttgattatatggtggtgtgaacattagccgcctcaacaggaagtgggaaaccggaaatgggggaaatatggagagagaagagaatataagagacaatataataaagctgccgaaaatagagcttcattgccatctggatggctcattaagccgtgaatttgtcgagaaaaggcttggcaggacggtgcaggaggcagagcttagcgtgtcggatgactgcacaagtctcgcacagtatctggagaaatttgacttgccggggcagtgcattcaggatgaaaaggggcttgagggagccgcctatgatgtgcttaagggcatgcaccgggaaaacgtcgtatacgcggaaatccgctttgcaccgctgctttcagagaatgagagcatgagctgcgagcgcgtgatagaggctgcaattaagggtcttgagagaggaaaaaaggattttggtatagaatatgggcttattgtgtgtgccatgaggcatcacagcgaggaacaaaacagacgcatgctgcataccgcaagggaatttttaggcgcgggtgtgtgcgcggcagatcttgcaggtgctgaggtgccttatcctatgtccggattcatggagcttttcaaatatgcaaagcagctcgggctgccttttacaatccatgcgggagagtgtggaaatgcacagaatatcatagatgcagtggaggccggcgcagccaggataggccatggaatagccatgagaggtcacggtgatatggaaagacagctttcggcaaagggcataggcatcgagctttgtccaataagcaacctgcagacaaaggcagtggcttcagcagacgaatatcccatcagggagtttttggacgccggattaaaggtcacaataaacacagacaaccgcaccgtaagcaatacaactctgtcaaaggagcttgaattcatagaaagaacctatggcatacgcgatgaagagctgccgcttatgatgaaaaatgcactggatgtggcatttgcggatgatgccgtgaaggagcggatttttaggcagctagtatagtgccgcgagatttatggagatttaacatttagctgcagcacaaatttacggactggaaaatggaggtatgacaccatgaagaaatataacagaatttttgtgatagtcctggattctctgggaatcggcgcaatgccggattcggaaaggtttggagacacagatgtagacacctttggacatatacttgagaggatgcagactctcgacatcccaaatcttacaaggcttggaatgctcaatctgcactgtggcggtcagatgcagccggctgctgagccaatcggcagatttacgcggctggcagaggcaagcaacggcaaggacacgatgacaggccactgggagatgatgggcataaaaaccgaaaagccctttaagaccttcacagagcacggatttccaccggagctcatcgctgagcttgagaagcagtgcggaaaaaaggtcataggcaacaagagcgccagcggcactgagataatcgaggagctcggagaggaagagataaagaacggttcgatgattgtatacacgtcagcggattcggtgcttcagatttgcggcaatgaggagacctttgatttacagaatctctaccgctgctgtgagatagccagaaaaataacactcaaggacgagtggagagtagggcgcgtcattgcaaggccatatgtgggaaagaaaaagggtgagttcgtgcgaacctcaaacaggcacgactatgcgcttaagcctacaggtcttactgcattaaatgcattaaaggacagtggactggatgtcatttcagtcggcaaaatcaatgatattttctgcggagagggcattacagaggcattccgctcaaagagctcggttcatggaatggagcagaccattgatatttgtgagaaggattttaaagggctgtgctttgtgaatctggtcgatttcgatgcactgtggggacaccgcagaaatgtgacaggctacggagaggaaattgagaaattcgacaaaaatctgggcattttaatggaaaagctaagggatgatgatctgctcatactgaccgcagaccacggaaacgaccctacctacaagggaacggaccacacacgcgagtatgtgccgtttatcgcgtattcaaagagcatgaagggcggcggagcaattgaggaggaagcgacttttgcggtgattggagccacaattgctgacaacttcggcgtaaaaatgccggagggtaccatcggacattctattcttgaagagctttaatgggtaatatctcaggaattttttaactttaacagaaaatatatggagaaaaaaatgaacagtatatatgaaaaactcaccacatgccttgcaagtgtgcgtgaaaaaacagattttgtacccgagacagccatagttttgggctcgggacttggagactatgcagagcagattaagatagagaaaaccatagattacaaggatatcaagggctttccaacatccacagttcccggacacaagggcaggtttgtatttggatatgtggatagtgtgcctgttgtcatcatgcagggcagagtacattattatgagggctatcctataacagacgttgtgctaccgacacgcctcatgggaatgatgggcgcaaaaaagctgatactcacaaatgcggcaggcggtctcaatactgattttaatccgggagactttatgctgatttcggaccatattgcgacagccataccaagtccgctgatcggagccaatattgatgagcttggcgagcgttttccggatatgagcgaggtatacagccgcagaatgagggaaatcgtaaaagaaaaggcagataagctgggcataaagctgagagaaggagtctacgtacagctcacaggcccgcagtatgagaccccggccgaggtcaggatgtgtaaaatcctcggaggagatgccgtcggaatgagtacagcctgtgaggcacttgcagcgcgtcatatgggacttgaggtttgcggaatctcatgtatcaccaacctggcagcaggactatccgacaaaaagctcaaccacaaggaagtgcaggaaaccgcagaccgcgtggcaaagcagtttacagaactgatcactgctgtggtgagagcggtgtaaatgcttagaaacttgacaataaatcgtatcatagcgtatactttagaatcctaactgatgggatggaggatttcaatgttaaatatatatttaggggatatggaaaatgcaatttaccatcctccggtgtattttgataacacatatgaagatgaatggataacggatgagctgtctgtcaaaatgataaaagatatagataaatcagacgtcattggaccacatctggtacaaagcccgatactgggaccgatatccacaaaggaattgtccggtggagtgaaaacccttatgctgatggcttttgatgatagcggaaaaatttttaacgcttcagcgtgtggtgataactgcgcaaagtggatattgagaattgcgggcaaaaagaatctgacaattaatctgcatcatataatggattttggtaaagattttgaggcaaagatactgaatacgggagaaatagttcacagtatggctgaattcatcagtgttgcaggtaaatatgtataggagaaagtatgaagggtaagcataaaattgttgtgaaaaacaatagacttcattatgaatttgaaataaagagaaatatcacgataataaaaggggacagtgctacagggaaaacaacactcataaatatgatcagacaatttgcaaatctgggtaatgcaagcggaattgaaatcgaatgtgatgccccgtgcacagttcttgagggaaatatgtggcagatgctgctcaaaaatttatcaggaaatatcatttttattgatgaagagaatcagtttataagacagcaagagtttgctgaacttgtaaaggtgtcagataattattttgtgataataacaagagaaaatctgtacaatctgccatatagtgttgaagaaatatatggactgtattcttcaggaaagtatcagaacacaaagcaaatatatcaggagatgtatcatatttatcctttaaatcaggatctttcatgtaaacctgacaaaataattgttgaagatacaaattctggatatgagtatttcaaggcaatatcgaaagaaaaaaatatagtgtgtgaaagcgctggtggaaaaacaaaaatatttgctatgctagaacaactaaaagctgaaacagagagtatttgtgtaatagccgacggtgcagcaattggcccggaaatggatgcattatataaaatgtctgtggaaaaaggcaatataaagttatatctgccggaatcatttgagtggattatactcagttctgagttgcttgaagacaaagaaattaaggatattatggacaaacctgagaattatatagaaagtcaggaatatttcagttgggagcgattttttacaaagctgcttgtggataaaacggcaggaacatacctgaaatatcaaaaaggaaagcttaatcctacatatttgcatgagaagaataaaaatataattttgagaaatataaaaaatagtatagatttttaaaaagtatgataaattggcgcaggaattgtttactgcgccaattgttatgttaaattataaatgggctcatttattaacaagcccgtaaatatagtgattacaccacttcccatgtagtataagataatcatgcaatagcccctcctgcacgaagccaagcccattaagaagcttcatcgaaggcacatttcccgggtggacaaccgctgtcaccttgtgcatgcgaagctcattaaaggcaagcttggtgcagaagccgactgcctcagtggcataccccatgtggtgaaactcactggaaaatttatagccaatttcacagcttccgtagaaagccggagcgatattatgtatacacacagtgccgataatccggcacggattttccttcttaaaaacataaaatctgaaaagctgtgatttgacagccatattgtattcatatctgagcaccttctgcaggtgcttcacagtataaaagtccggcacacggtctatttcatacatttcgaaaagctctttatccctattgtaaaaatccaaaacctgcggggcacaatcagcgcgtaataccttaagaagcaggcgtggggtttcatattgaaaaaacatattttccttctttcacatttggtgtatcatgtaattattcaaaaccacctcacgcacattcgcaaaagcgcacgatactcgtgctttgtcactgctacgcagttaattttgctcatatgtgtggggtggctctattcgagccaccttgagaacaagaaaaactgctgcttacatgcgagcatgacgcatcagcttttcttgttctcagtggttctgaatagttattgtattataatagattataacacatggagcagacaaatatgacacaagatgaaaaatatatgaaacaggcaataaaacaggcaaaaaaagcatatgcacttgatgaggtgccgataggctgcgtaattgtagccggtgacaaaatcatcgcacgcggttacaaccgcagaaataccgacaaaaatccactcgctcacgctgagctttctgccatccgtaaagccagcaaaaagaccggagattggcgtcttgaggaatgcaccatgtatgtcacccttgagccctgtcagatgtgtgccggagcaatagtacaggcacgcattcccagggtggtaataggtgccatgaatccgaaagcaggctgtgcaggctcaatcatcaatctactgcagatgcagcagttcaatcatcaggtgcagacagatataggcatctgcggcgacgaatgcagcactatgctttctactttcttcaaggagctgcgaaagaagcgcaagcttcaaggggagtaaataaattgtggttaaaaccacaacgtaaggcacgtaagccccgggtaccggactcacacgtactctcccgaagcgcgaatagcgaagaggtttagatactgtagaaattatgcccatgagacacagaaacgccacggcatggacgcaggggcgaggagaaccgcgccatggacggcgcgtttcgacggtttcgtcaagtatagaaaaaactcaagcataatttcgtacagtatcttagccacgtagcgtagcgacggcgggagagtatgtgtgcgcgtccggtacccggggcttgcgtgccgtactcatcccacaagaagttgcaataaatcttgacaaaaccctgcataatagcgtatacttaagactccgagcagccggggtggtagcggtaccttgaaccaacaatccgctatagttggggtgatgcttcgtagagggcttaagcggtggagctgccctccataagtggcgttgacgtctgggtcttgcgcaatggaaatctatgaaccgtgtcagggtgggaacacagcagcactaagtagaagctttcatgtgacgcgaggcagcctggagggagttaactgtggaggtaacgtctgttgtgatggttcgaagcgaggcgctcggatttttagcgcataaaaaagaggcgaattttcggttgtagtggcacggtttatacgcacgaaataaagaaaatcgaggcatacaatgattcaggacattgcaccacatacgtgggacataacatacaaaaacatacagccggacccggacagcagggtccttttttttagcaggggacagcttcttgtgcagcaggcatcggacaagcctgctgacgaatccaatcaggatattcatcagataagctttccaagatatgaggatataaaagcagaatgccccgatgctaaatatcagtatctgtttacacttgacgatactgcatttttcagggtggcactgtcacatgctgacaaaatgcatatactggaagtaacaggtggcaaattcataaaccggcactatatgcgcagcgcgtcaccgaaggagtacgtgcttgccgcgataactggatttcatctggatggctggtatgataagaaccatttctgcggcagatgcgcaaacaggctggtagaggacgatgtggagcgcatgctcagatgtccggtctgtggcaacatggtttacccgcgcatcaatccggctgtgatagtgggagttaccaatggagataagctgcttttgacaaaatacaatggcagagagtataaaaagtacgcacttgtggcaggctttaacgagataggtgagtcgcttgaggagaccgtgcgccgtgaggttatggaggaaacaggactgcgtgtgaaaaacatcagatactacaaatcgcagccgtggggctttaccgacaatatactagcgggatatttctgtgaagttgacggaacagatgagattgaggttgacatgcaggaactttcgatggcaaaatgggtgtcaagagaagaaatacctacatccctagaggaattaagcctgacaaatgaaatgatttctgtttttcggcttgacaaaggcgatttctgaatgtatagtaaaacagtaggaaatgaaacagaggtgctataaatgaaaatttcaacaaaaggacgttatgctcttcgcctcatgatggatcttgcagagaacaacactggttcacccatcagcctgaaggatgtagcgaagagacaggatatttcagataaatatcttgaacagattatatccattttaaacaaggcgggctacgtcagaagtgtcagaggcgcccagggcggatacatgctgaagatggaaccgcagaactacacagtcggcatgattctcagacagacagagggcagccttgcgccggtagcatgtatagaggatgacgagatagtctgcgacagacagcagcagtgcgtcacatctattgtgtacaagaagatcaatgatgcaatctcaggtgtggttgacaatatcaccttgcaggatctggtagactggcagaacgagaagaatggaaattatgtcatataaagaaagaaggttatcatagatgagcagattaatttatttggataatgcagcaaccacacaggtatatccggaggttgtggatgcaatgcttccttactttacagagcattacggcaatccatcagctatatacagctttgcagatgaggcagaaagagcagtggatcatgccagaggagaggtcgcagaccttatcggagccaagaaggatgagatatatttcacaggcggcggcagcgagtccgacaactgggcattaaaggccacagcagaggcatatgctgcaaaaggaaagcacatcatcacatcagccatcgagcatcatgcaattcttcacacagcacagtggcttgagaagcatggctttgaggtgacatatgtgggtgttgatgaggacggaaaaatcaagcttgatgagctgaaggcagccatcagacctgacacaatccttatctcagttatggcggcaaacaacgagattggaactatccagccgcttaaggagatcggagagatagcaaaggagcatgacattttgttccacacagatgcggttcaggcattcggacatattccgattaatgtagatgatatgcatatcgacatgctcagcgccagcggtcacaagctcaacggaccaaagggcatcggcgtgatgtatatcagaaagggcgtaaaaatccgctcatttatccatggcggagcacaggagcgtcagagacgtgcgggaacacacaatgtgccgggtatcgtaggactcggcaaggcagtagagcttgcaaaggccaacatggcagagcgcagcgcatatgagacaaagctcagagaccacctcatcgagagagtgacaagtgagattccatatacacgcttaaatggacacagaacagacagactgccaaacaatgcaaacttctgcttcagatttatcgagggagagtcaatgcttatcctgcttgaccaggcaggcatatgcggcagctcaggttcagcctgcacatcaggctcactcgacccatcacatgtgctccttgcaataggactgccacatgagatagcacacggctcactgcgtcttacattatcagagaagaccactcttgaggatattgactatacagtggacaagttaaaggaaatcatagcaaggctcagaagcatgtcaccgttatacgaggattttgtaaagaaaaacggcaaatccgaggcataaatgatcaggtcaaaaattatagtgactatcacaaaattaatatatacatgaaaattaggaggaactaaggacatggcatacagtgaaaaggtaatggaccattttaaccatccaagaaacgtaggagagatggagaatccaagtggtgtcggcacagtaggaaacgcaaagtgcggagacatcatgagaatgtatctggatatagatgacaacggcattattcaggaggccaaattcaagaccttcggatgtggcgcagcagttgcaacaagcagtatggcaacagagctcgtaaagggcaagacaatccaggaggcgcttgaggttacaaacaaggcagttatggaggcacttgacggacttccacctgtaaaggtacactgctcacttctcgcagaggaggcaatccatgcagcactctgggattacgcagagaaaaacggtatcaagatcgagggactcgagaaacctgtaaacgatatcagcgagaaggaagaggcgcctgaggaagactattaatgaaaaagaaggttgtagtaggaatgtcgggcggagtggattcgtcagtagcggcatatttattaaaggaacagggatacgatgtcatcggagtcacaatgcagatatggcaggacgaggacgtatttaaacagtcacaggagggaggctgctgtgggctatccgcagtggaggacgccagacgagtggcagcagtgcttgatattccgtattatgtgatgaacttcaaggctgatttcaagaaatacgtcatagactatttcgtgtccgaatatgagcgcgcatacacgccaaatccgtgtatcgcctgcaaccgttatgtgaaatgggagtcgctgcttcaccgctcgctcgagataggagcagactatatagcaacaggccattatgcccgcatagcacagcttccaaacggcagatacaccatagccaactcagtcacagcggaaaaggaccagacatatgcgctttacaatctgactcaggagcagctacgtcgcacgctgatgcctgtgggagagtatgaaaagccacaaatccgccgtatcgcagaggaagcaggtctgccggtagcgcacaagagcgacagccaggacatatgcttcgtgccggatcacgactatgcctcattcatcgagaatgagacaggcaaaacctatgagccgggaaatttcgtggatgaatcgggcaatattctaggccgtcataagggcctcatccactatactatcggacagcgcaaggggcttggaattacagccgcaacacctttattcgtgaaggagctgcgtccggcaacaaatgaggtcgtaatcagcacaaatgagtcacttttctcagacacctgttatatcagcgatataaactacatggcacaggagcacatcacaccgggcacccgcagcataggaaaggtacgctactctcacaggggagctgactgtacacttacccctatggaaaacggcatgataaaatgtgtatttgacgagccgcagcgcgccatgacaccgggccaggcagcggtattctatcaggatgggcatgtactgtgcggtggaacaattgaaaagatgatggtaaattagcaggacttttgaatagtcgcgaatatattataatagagcagacagcataactaaaatgccgtctgctctattaaattatagggaagtttaaacaactagaagttatctgtgtatcgtacagaaaaaatttcaattttatgtttatctctaactcaagaattcaataattgttaatatcaaagatacaataatacatattgctattattccggaaccaaaaattgctactattttcatttgtttcgactttctattttttattttttcaagtatacctgttgtataaagaaccattgtagccaacgctccaacacctaagcctaaacatgttcctttcatacactcgtatatcggaatcatagaatcataattaattgcttccataactaatcctataactaaagatattagccctataatacttatcaattttactctctttaatattactgacttttctgcacctgcataattagacattgcttctgcaacttcttttacttctttttccataatctcgcttttcctttctccattgatgatttcaggaatacttacattgaaaaattctgcaatatcaactaatagactaatatctggcatattaacccctgtctcccaacgagatacagttcttccagatacatttagattttccgcaaattcttcctgtgtaattcccttttctttacgaagttctttcaaaaaacttcctattttcttttggttcatattagctgcctcctttctcatcaacagaataacttaatgagcaaatatacaacacgacacaaagcgagagaatgccgtatttacgctattagacaaatctgtctagtattatttatattgattttagcctcaaaaacttaaatttcacgaactaactacattgtcaaaaaattcattacaagattcaccattatatctttttcttctggtcttgactctgcaatcataagcgtaatcgcaatcaatgctccatcactgattatcttactgtaagctgtaaaccgagatgctgaaaaatattaagcagtgttccgaggtttggtgttgttttgcaggattcgattcgagctacggatgattgtggaataccacacatagcagcaagctctctctggctaagtccgagagaagtacgctgctccaccatggcacttacgatagaggaaatattttcaacttcatcgatgtcttttcctatctacatttccataatcgtggactatacgatttctcaatccatagattgcattccatggaacgtttcctctgtggagtttatattcatctgacaatttttttgcattctcagatatttgaatcatacgaaataacatggaatcgagaaggacttcatttgcattaagttcctcaatatcaacatttttcatatgtgtaacaacaaattctaaatcctgtttcaaccttttaatataataagcatcattcttaacattatccatatatttttactccatctcttagtatttcctgtgtcagctcaaaattatctttcaattgatttatatcaagtacatcaacttttttgtgaagtgcagttcttatatcctccactaatccatagaattttaagccggtcgcatctgtcgaaattaaaagatcaacatcgctggttggttttgcctttccttttgagtatgagccaaacagataacagaaattaacattatatttatcaaatacatctgagcattttctttttatataatcaatatcaactataccattttcttcatcaataggattaattttagatattttttcaatcatatatttgtactttatgctatctgcctttttttcatcattttcataagatttgtatgaacgcaaagaaactccgagtatatccgcagcttgattttgtgttaattttctctcaattcgtaaagattttaattctcccatgtttgcacctctaaatatagagtagtgcaaaatttgcactttgtcaagctggatagtgcaaaaattgcacttttatttttaattttatgtaactattctaccaatatgattttagaccatttggaatcacgagcttaatgtgtaataacacatagatattgcaacgaaacaacgtatactcttcttaatctgttatttttaacgagattaagaagagtatatttgcgttttgacttgttttttgctcaaaatatcgttatactttacttaaagtgtataaaaaaagagattaagaagagtatagcaatataatatattttgggtggaggtgcaggatgcttgtaggtagagaaaaagaattacatttattgcatgatatacaaaatgatgatagctcacattttgtggcagtatacgggcgaaggagagtgggaaagacctttctgatacgtgaggcctttggctatagatttgcatttcagcatgccggtctgtcagagggaggaatgaaggagcagatatatgcgtttacgtcatctctcaaagatgcagggtatcatgtgaaaaagcagcccaaaaactggcttgaggcatttgaagcattaaaggatgtcataagattgtcgagtgaaaagaagaaaataatatttattgatgagctgtcgtggatggacactcaaaagagtgatcttatggttgctttggagaatttctggaatggatttgcttctgcaaggaaagatatagtccttatagtgtgcgcgtcagccacatcatggatgctctcaaaggtcgtacacaacaaaggcggattgtataacagattgacagagcagatacatctgcgcaccttctgcctcagggagtgtgaagcgtatgtaaaagctgccgggctggcattaaacagaaatcagatattgcagtattatatgatttttggcggagtaccttattattggggatttttgaaaaagggattaagcctttcgcagaatattgatagtatattgtttgaaaaggatgcgcccctgcgcgatgaatttaagtatttatatgcttctgtattcaaaaaaccggagaattatgtaaaaataatagaagctcttgggactaaaaaggttggaatgacaagggaagaaatcattacagcgaccaaaatacctaattcgggagatctgacaacgaagctcgaagagcttgaaagctgtggatttattcgcaagtacaatgcatttgggatgaaaaagaaaaatgcgatataccagttgatggattgctttacattgttttatttcaaatttttgaaatcagaacctacagatgagcatttctggacgaaccagattaatacacccgcagtgaatacatggctggggctggcgtttgaaagagtgtgcatggagcatgtagatcagattaagtttaaactgggtatttcgggagtgctgacagaggtaaattcgtggtactgcaaatcagatcctgataatggcattttcggctcacagattgatatgctgattgccagaaaagatcaggtgattaatttgtgcgagatgaaatattcgcagtcagaatataccataacggagaaagtggacaggagcattaggaataaaataagtgatctgagagtggtttccggtacaaagtatgcgatatacccaacacttattacaacctatggtgtagtggaaaactcgtattcgcaggagctgcagtcggttgttatgatggatgatctgtttgcctgagataaaactatacgtttaatatttttctgcataagatctgttgacaagtgaataataatagcataaaataaaagtactaaaaaacatacgattttttgtacggaaatgaggcgttaaatatgttagcagtaaagagcatggatgtaagagaaaattttaaatcgttatgtgataaggttttcagaggagaaacattgattgtatcaagaccaaagaatgaaaacatagtgatgatgtcggaatctgaatacaatgagattatgaaagccaagagaaatgctgaataccttgctatgctggataaatctatggctgaagccgaagcaggtggttttattacaaagacagtggatgagttaggagcatacgaataatgaatgttgtatttactccgactgcatggcagcagtacacagactggcagaaggaagataaaaagatcgtaaagcggattaacgagcttataaagagtatagatcgtgatggactattagaaggaatcggtaagcctgaaccgttgaagtataggaaagtatgtagcagacggataacggacgaacacagacttacatataactttgatagtaaccaaaatctcataatatattcctgtaaatttcattatgaagattagcaccgcattaggtgactttctttttactcaataagctcattatctaagagaatattataacagggcataaaaataaaatattaaaaaccccataaattcctgttgacagataggaattcatggggtatatttatatcaacaattaattcatacaaatacagtatgaatataggagattaaaacaaagcattaacattacaatgacatcaaggaggacacaaacatgtcaaacatttatcagggaacattaggacttattggaaatacaccgcttgtagagcttacacacgtagagaaggcatacggacttgaggcaagacttcttgcaaagcttgagtacttcaacccggcaggatcagtaaaggatagaatcgcaaaagagatgatcgagcaggcagagagagacggaaagctcaagccgggctcaacaattatcgagccaacatcaggaaatacaggaatcggacttgccgcaatcgcagcagcaaagggatataagattatcatcgttcttcctgagacaatgtccatcgagagaagaaacatcatcaaggcatatggcgcagagctcgtgctttcagacggtacaaagggtatgaagggagctatcgccaaggcagaggagcttcatgagcagattcctgacagctttatcccagagcagtttgagaaccctgcaaacccggaggcacacagaaagacaacaggtcctgagatctggaacgatacagacggacaggtagacgcattcgtagccggagtcggaacaggcggaacaatcacaggaacaggtgagtacttaaagagcaagaatcctaatgtaaagattatcgcagtggagcctgagacatcagcagtgctttcaacaggaaaagccggagcacacaagattcagggaatcggagcaggcttcgtaccaaacacattaaatacagaggtatatgatgaggttatccctgtatcaaatgaggcatcatttgagtacggaaagattatcgcaaaagaggagggcgtacttgtaggtatttcttcaggagcggctctctatgcagcaatcgaggtagccaagagaccggagttcaagggcaagacagtagtagcacttcttcctgacagcggagacagatattactcaactgatcttttcaaagattaataaagtatattatgatagcgaataagacacccctgcggtgtctttttgcatataattcaattgattctttaaataccataaacttttcctttgttttggattctcgggttactatttacctttacatttttgggttttggagttatgaatatttagggataatatattagttatatcttgataaaaatgccaaaaagggataatatattagcatgattaacttatatcaaaaaacatggacagaaataaataacgacattgcacaaaaaatagtacgcttgcgcaaaagaaagaaaatcactcaaaagcaattagctgcaaggtcaggtgtaagtcttggttcacttaagcgatttgagcagagcggcgagatatccctgcaatctttgaccaaaattgctatagctcttgatgtggagaacgaacttgaagacttgtttaataatgtgccttttgcgtctatcgaggaggtaattaatgaacagactaaataagctggaagtcttttatcatgaaagactcgtcggaacgattgctttgtaccaaaatcgtctggctgcgtttgagtatgacagtaactggctggcaaatggattttccataagccctttttcactgcctttggagaaaaaagtttttataccaaagatagatccgtttgagggactttttggcgtttttgcagatagtctgcctgatggatggggcagattgttggttgatagacttatgaagaaaaatggcataaatccacatgagataggcagccttgagagactagcggttgtaggaaactcaggaatgggggctttaacctaccagcctgttataacaatggaaaaaaatcacgatgagaaatcgttggatgaaattgcattggaatgtgaaaaaatattgagcacagagacttgcgataatctggactttctgttttctaagggaggctcttccggcggagccagacctaagatacttacaaaggtagatggagaggattggatcatcaaattcccgtcatcttatgatagcaaagatataggcagacaggaatatgattatgcaatgtgtgccaaagaatgtggaatagcaatggaaaacgtaagattattttcctctgagcgcacgaaaggatattttggaacgaagagatttgaccgtactaatgactcaaaaagcagaaggattcacatgatatccgtttccgggcttttagaaacatctcacagaataccaaatctcgattatgatattctgatgcagcttacactccagcttaccaaatctatggaagaatgtgaaaaattgtatagacttatgtgctttaatgtgtatgcgcataacagggatgaccattcgaagaattttacttatctgtatgatgaagatgaatgtagctggaaattgtcaccggcgtatgacctcacctacagtaattcaatcggtggagagcatgctaccacggtaaatggaaatggtgtaaatccggaactggatgatattctcgcggttgccaaaaaaattggattaaatatgacaatggcaaggaaaaccgcactgaatataagagattgtgttagtgaaatgcttggggagtatctatagtgcagtgataatatgttatcacctataaatacccattttccgttataactatattctataatggaaaatgggtattttttactctattcctaattcgaaaaatgacgtatcttcagatgaatacccctctcatcagcaatctgctgacaagtctttatatcctcctcggggagtacatccacgatagaaagctgtgtatgcttgatcatgcggttgcattcctcagcaaaatccagcatagcctcataagcattgtcaaaggttggtcttgtgaccttattgtattcctcggcatttgcagcattcaagcttatggaaaccgaatcaatatactcagaaagctccggcacgatatcccttccgtgatagagattgcctagtccgttagtgtttacgcggataggaagcttatacttttccttcacatatttagctgttttctcaaggatatccagcgcgcaggttggttcaccgtagccgcagaagacgaattcctcatagcctgtaaaatcaaatgcatcgattgcagctattatctcatcatatgttgggtccaccgtatgccataatgatgtcgcatcgcctatagcgtccttctgagagcgtatacagaatgtacaagcgcagtcgcatttatttgtgatatttgcataaacttcgttcttatatgtatagattatatcagccattatttagtctcctccaatgtgaaaaatcttctcttgaatccgattttatcaagtaccagtccaagaataacaaatattatagcacttccaccgctttgtatacagcttcccggaacagaaaccggaattattgcgatgagaccggtgaaggcctgctttgtgaagccatatgtgataaaggcctctgcaatggcatagccggttgcggaaattgcgaaagctatgattgtcgatactacatttctcacggtcacaattttatctgatttgttggtaaacgggatggatatgagtgcctttatgatgattgttgcaggcgcccagataggtgcggtcagcaaatctgccatgccaccgccgatagctgcggctgtcattgcatacggccatggaaggaggcacgctgcgatatagataaggctatcgccaaaatgaatatatccgccattctgtccaaccggaatgtggcatatatatgctgtaaaaatagtaatcatggctgccatgagggcagtaaatgtgagttttttaacctgtgagttcataaaaatatgttctcctttgttttgtgttaagcctaacttaagaggtcaactgacaattcgataaattttctgcgaagggtgataagaatcacataaacatcacatcagctcccgtaaaaacttctcgaaattcactccgtcattcggtgcggtgtcatcattcatggtatctgcgatgctgtcatacaggaattttccggcgcgctctgcggcctcctctgtggaaaatccgttcagcctgcttccgcatataacagatgcaaacagatctcctgtgccggaaaagctcacgtcgaaaaagtgtgatctgtgggttgtagtaccgtttgcggtagtcacgagattgtagataaagggcgacttatcatccctgcatttgatgccggtgatgattacatcctgatttttgccggacaggtctcgcagcttctcgcttatctctgtcgcaagaggcaggagcacatcctttctcgtgtcgctgtaaaccttctcgatatcatagtctgccaaaaggcatgcctcggtcagatttggtgtgatgacatcggccttcctggaaagcgccttcatgccatccaaaagagcggcagagtatatgccgtaggttctgccgtcatcgcccatcacagggtccacgagcagcatcgtgttttcctcataaaatacattcaaaaaatccataaaaagctcaatctgctttgagcctgtcatgaaaccgctgtaaatgccatcaaaatgggcattatttttctgccagttgtcgatgtagtccttaatcatggctgtcaggtctgtgcatttatgatattcatatcctgtctggtttgtcagcactgctgatgccatgggacagcactgtacgccctgtgcggacagtaccggaattgcggcggtcagagagcactttccaaagccggacaaatcgttaaaaacggctgctttcttcatatatcctccaaatttttttgcttaattttctcatacaaaatataggataagtatacatgcgtctgaccatatttctatgaccagaaagataaaaaaataaatgccagataaaatgtttttgaaaaagaacgctgtctgtgatattatagatgtgtatgtaaatacggaggtaaaagcatgtttcaaaagaaacagattatatatagtgaaacccttggagtatgcgtggttgacaacatagtatcgcttgcggcatctaagagagaaaaggcggtgccgtactatgtgctgaagcctgtgtttgaggacaaggtgtcatatataccggtagagcatcaccgggtggtactgcgtgatatgttcaccagagaagaagctctaaagcttaaggaaactgagcagtataagaatgataagcaccttaggcaggcagttgactatgtactggacaaggtggctataaaataaaattacaacaaggaggacaggattacatgggacagcagcatgcaatacacaaatttgtgctgggaaccaaggacttcgatgataagcagtcagagttcatgtacgataaaggctggtacagcatcacagatatagtaggtgaggagaaaaatatcatctacaagtcaagaaatgcccaggaggcatatcttaagtggaatatctatatcggcaggaaaaaggaacgcctcacacctgaggagaggaagaggcagcgtgaagaacgctatgagaaaaagagagaacaaaacagagagcaccacaggatataggagggcattatgggcattttcaacatagacaacaaatttttcagagcattaaacaaactggtagatatggttattttgagcttttgctggatcatatcatgcatacctgtttttacaataggagcggcatccacagcactttacgatacatcgcgccgtgtcatccatcacgatgagggctatgtgtggagaggctactggcatgcgtttaaggtaaatttcaagcaggccaccaaggcatggctggtacagcttataatacttatcgtgcttttgggagatatttatattacatggtcaggtcttaagacaggcaatcagtggggaaccttctccatcgtgttcatcataatggcacttatcgccgcagcctgggccatatacacatcagcgtatatttcacgatttgagcaggtcacaaagataacccttaagaatacaatactcattcttatcgccaacctgccgtggacattattggtcatagtgatacttgtggtatcacttatacttgcatggattattattccactcattttcatacttcctgtcggcgcagcactcacctatgagtttatttttgagcgtattttcagaaagctcatgaatgaggaggataggctccgcgaggaggagaaggataaggagtacagggattagcataataaaagacaatcataataatgcataaggaggaagcagcaatgaagaaaattggaatgcttaccagcggaggagactgccaggcacttaacgcagccatgagaggcgtggtaaaggcgctggcacacaatgtcgacgagcttgagatttacggctttgagaacgggtacaagggactcatatatgagaactacagaatactcacatcaaaggatttttcgggcatcctgacaaagggcggcacaatactcggctcatcaagacagccttttaagcttatgagagtgccggatgagaacggactggacaaggtcgcagccatgaaaaacacatacaagaagcttggtcttgactgtctcgttatcctgggcggaaacggcacacaaaagacagccaatcttctcagggaagagggacttaatatcattcatctgccaaagacaatcgacaatgatatctacggcacagatgtgacctttggcttccagagcgcgatcaatatagctacagatgcaatcgactgcatccacaccacagcagcatcccacaaccgtgtatttatcgttgaggttatgggccacaaggtaggctggctcacactgtacgcaggtgttgcgggcggtgcagacatcattctgcttcctgagataccatacgatattgacaaggtcgtagatgccatccacaagagaacaaaggagggcaagggctttaccattcttgcagtagcagagggagccatctccaaggaggatgcagccctttccaaaaaggaatacaagaagaagcttgcaaagagcaaatacccgtcagtatcatacgaggttgcagaccgcatcagcgaaagactcggtcttgaggtcagagtggcagttccgggacatacacagcgaggcggcagcccatgtccttacgacagagtgctttgtacacgtcttggctcagcagcagcaaaggccatcatggatgaggattacggctgcatgatagccatggtaaacggacagacaaagagggttccgcttgccgacgtagcaggaaagcttaagactgtagatccaaagagccagatgatcaaggaagcaaagcgcaccggtatctgcttcggagattaagcagcaatattagatataaggaaggtgaaaaggcgtgtcttatcaggccctataccgtaagttccgtccacaggagtttgaggacgtaaagggacaggaacacattgtaacaacactgaaaaatcagataaaagctgacagaatagggcatgcctatttattttgcggcacgagaggtacaggaaagaccactgtggccaagatatttgcaaaggcagtcaactgtgagcaccctgtagacggaagcccatgtggcgaatgtccgtcgtgcagggcaatcactgagggctcatccatgaatgtcatagagatagatgcagcgtcaaacaacggcgtggacaatatcagacagattcgtgaggaggtcacataccgcccgacagagggcaggtacaaggtctatatcatagacgaggttcacatgctttcggcaggagccttcaatgcacttttaaaaacacttgaggagccgccgagctacgttatatttatactggcgaccaccgaggcacacaagataccgattactatcctgtccagatgccagcgctatgattttcacaggatttccatagatacgattgcatccagactcagcgatttgatggagcaggagcaggtggaggttgaggagcgtgccataaggtacgtggccaaggcaggagacggctccatgagagatgcgttaagtcttcttgaccagtgcattgctttccatctgggtgagaaacttacctatgaaaatgtgctcgaggtgcttggagcggtggacacagaggtgttttcaaggctcttaaggcgcatactcgacgaggatgtgacaggcgccatccgcatactgggcgagctcatagatgagggcagggagctgtcgcagcttgtcaatgatttcacatggtatatgaggaatcttttgcttttacagagctccgacgatatggaggaggtgctcgacatctcaaaggacaatcttgaggcgcttaaggaagaggcagcgcttgtaaagcctgagacactcatcaggtatatcagggtattttccgagctgtccagccaggtaaagtttgcatcgcaaaagcgtattatggtcgagatagccataataaagctgtgcaggccgcagatggaaaagagctatgattcggtgcttgaccgcataaacagcatagagaaaaagcttgaaaagggtatacctgtagcggcacaggctgcgcagacacaggatatgcagcaggccgcaacaagcgggcctgtagtgaaaaaggagcttcccaaagcaataccacaggatatctcagagctcatgaagcactggaaatccatactttcggagatgggagcaacatcaaaggtttatctgaacaaggctgtgacatcgcttggcaattcctctgacctgattttaatgtttgatgatgagaatgcatatgagtatctctctgaaaaccgtgcaggctgtatggatacgctggcttcgcttatagaaaagcgtataggcaaaaaagtcgaggtgacggtcaagaaaaataattccgcagtcagtgcaaaggaagcggttgtggacttgacagatatgataaattttgatatagaggaagaaaactaagttataaacagggctgggattagcccattaaaaacaaggaggacgccagaatggcaagaagaggtggattccctggaggaatgccgggaaacatgaacaatcttatgaaacaggcgcagaagatgcagcgtcagatggaggaggctcagaagcaacttgaggatgctgaggttacagcaaaggcaggcggcggagcagtcgaagtcactgtttctggaaaaaaggaaatcacaaaggtcaaattatctgaggaggtagtggatcctgacgatatcgagatgctcgaggatctcatcatggcagcaaccaatgaggcgcttcgccagattgatgagcagtcacaggcatctatgtccaaaattaccggtggcctgggtggcggtctgttttaatggatttttacagcagtgagatatcaaaactaatagaggagctgtcacagcttccgggaatcggagccaagacagcgcagagactggcatttcatatcataaatatgccaaaggagcaggcaaaatcgctctctgacgccataatcgatgcgaaggagcatgtcagatactgcaaatgctgctatacactaacagatgacgaactatgccccatctgcaaggatgcggcaagagaccacaagaccatcatggttgttgagaatacgagggatcttgtggcatacgaaaagaccggtaaatatgagggagtgtatcatgtgcttggtggcgcaatttcaccaatgcttggcataggtccggcagatattcgtctgaaggagctcatggttcgccttgaaaaagacgtaaatgaggtcattatagcgaccaattcaagcctggagggcgagactacggccatgtatatcagcaagctcatcaagcctaccggcatcaaagtgacacgaatcgcaagcggagttcccgtaggaggcgatttggaatatattgacgaggtgaccctgcttagggcgcttcagggaagaacagagatataaatgatagaaggagacatcatgaacaatcttgaacttgagaagatggcgaatgaaattcgcaaggacattgtgacagcagttcacagtgccaaatccggacatccgggtggatcactttcatcagcagatatttttacatatttgtattttgaggagatgaatgtagaccctgccaatcctaaatgggaggacagggaccgtttcgtgctctcaaagggacacgtagcaccgggactttactctacacttgcagagaaaggatattttccaaaggaggatttaaagacactccgtcatacaggctcatatctgcagggacatcctgatatgaagcacatccctggcattgatatgtcaagcggctctctcggacagggtgtatctgtcgcagtaggaatggctgcagcaggaaaatatgacaagaaggattaccgtgtatacacactcacaggagatggcgagattcaggagggacagatctgggaggcagccatgtgggcaggccaccgcaagctcgacaatctcgtagttatcgttgacaacaacaatctccagatagacggttctgttgaggatgtatgctcaccatacccaatcgacaagaagtttgaggcattcaatttccacgtaatcaatatcgacggcaacgatttcgaccagatcagggcagccttcaaggaagctcgtgagacaaagggtatgcctacagccattatcgcaaagactgtaaagggcaagggcgtatccttcatggaaaatgccgcaggatggcatggaaaggctccaaatgacgaggagtatgaaatcgcaatggcagacttagaaaaggcaggtgaagcattatgtcagaagtaaagaaaatcgctacaagagatagctacggaaacgcactcgtagagcttggaaaagcacacgatgaccttattgtacttgatgctgaccttgcaggtgccacaaagacctgtatattccagaaggagtttcctgagcgtcactgggactgcggaatcgcagagtgcaatatgacaggtatcgcagcaggacttgctacatgcggcaaggtgccttttatcagctcatttgccatgtttgcagcaggcagaaactatgaccaggtaagaaactcaatcggatatcctcatctcaatgtcaagataggtgccacacatgcaggaatctctgtaggtgaggacggagctacacatcagtgcctcgaggacctttcgctcatgagagaaatcccgggcatggttgtaataaacccatcagacgatgtggaggcaagagccgcagtaaaggcagcatatgaccatgtgggccctgtataccttagattcggcagacttgcagtgcctgtaatcaacgatacaccggactacaagtttgaaatcggaaagggtatcgtacttaaggaaggcaaggatgtatctatatttgcaacaggacttgaggtatcagagacacttgaggcagcaaaaatgctcgcagcagacggcatagatgctgaggttatcaatatccatacaatcaagccaatcgacagagagctgattgttaaatctgtatcaaagacaggcaaggcagtcacagtagaggagcactctatcaatggaggactcggaagtgctgtggcagaggtactctgtgaggagcagcctgcaaagcttttgcgtatcggtgtagaggaccgcttcggcgagtcaggaccggcagtggagcttatccacaagtatggactggatgcagagggcatctacaacaaagtaaagaattatatgaagtagtgggagtgtgagcttcgcactttaaggctgtgttcaccggtgcagcatacagtatattcctcagaaaaatatgaagtcagccgcaggatttcgtgtggatagcgtgtggaatgagtttagtcattcttgctattttacataatggaaccctgcggcagttcatattgtttcttcggaacatgctgtatgctttccggtggtatgtagtttgtcgagtgcgaagcaatatactactccatatgggaaaagtcgggcgcatggattcatgcgcccttttttcgttatcgaattacggttggattaaatgcaaaatgtttttataatcgcataatattgcataaatttacaatctgcaagtgctatgctgaccgaaaaaggaggctggcatgatagatattgtgacgaacaacgtcaagcagattggcacaccggcggatgagggccgggtttacatatcggagaaagcgtacaagcgcataaagacagagggctttaaggataaagaggtttttgtacttatggggcatacggagagcagcggaggcaggtatgcaacatttgtggaggcggcgattgcagtatatgatatggagtttgacaaaaatgcgcctctttggaccaacaaggtatggagcagagtgtttgcggagataaagaaaagctacgaggagctgattattgtcggatgggcattcaggcaggaggattttccggctgagccaacacccatgcttgaaaatatacacagggagcattttggcggcgctcatcagcttatgttccttttgaacaggaccgagcaggaggaaaacttctttatcaaaaagaataatcatctgaagaaaaagacaggattttttgtatattaccgcatgaatgagcattgtgataatgctgacagctataatgaaactgacacctgcaataaaacctgcagctatagtaatgcaaacaacaataataaaatagacagttatagtaatgccgatgacaataataaaagcagcaaccggtatgaggacactgacacagcggcccaaagcagctacagccggatacatagaagaacttcggcagacgacaggatcaatgtgtcgtttcctgaggaatttggcagcatatcgaaagaacgcggccggtacagaaaagccatggaggcaggaaaagaaccgcgcaagggttcgtttgcatctgtagtgatgattgcagcgatagcagtgcttatagtgcttatcgggcttaaagccggcgctggaatgagcggcacaatagacaaaaaggagacacttcctgccatgtcaacagaagaagatttaattcctgtggaaaaaatatccggtgaatggtatactgacaagtaacaaacactttggaagtagaacaaaaggataagattatggcacagaaatcagactttaaaactgtcgagaccgatttggacgagctcgaggagaaaatacgaaagcatagaagaaaaatagcaaaaagaataataatagtcgtggcagcagtcgtggctttatttcttatagtatggttgtggatggcgctgcgcacctacaagtcatttgacgtcaaaaacagcgtggagcagaaggacaagagtgcggtgtcgttcgtggatttctgtggagcggtagtggagtacagcaatgatggtgtattgtatacagactcagacggaaaccgtatatggaaccaggcatttgagatgtcatcgccacaggtagtcacatgcgaaagctttatgactatctatgacaggggtggaacagtcctctatatcatggacaagaatggagtaaaaaaagaaataggaacatcgtggcctattataaaagcctgcatagcaagccagggcacagtggcagtccttgtcagtgagaatgaaaattattatgtaaagctgtatgatgtaaacggaaaagagctggcaagtggtgagtttttcggagaacagaagaacatacctgttgatatagctctttcatatgatgctaaaaaacttgctgtagatatgatagatgtctccggaggaaagacggacagcgttatatccttttacaattttggctcagtaggacaaaatgagatagacaacaatgtcggcacttacaagtatgagaatcagctaatacctgaaatagcatatgtttctgacagcaggatgatagcagtttcagatcagaatattatggtatttgacggaagccagaagccaaagctgaagcagactattaagctggaaaagctgatagacagcgtattttacaataataaatatataggagtagcatactccaacaatgataaaaattgcaccagtcatatcaagctttatgattttaacggtaagatgcttatggaaaacgacacagctattgcctacaatagtatagagtttgacagcaataacgaggtgtgcgtcacaggagacacagcctgtgagatatacaccatacacggagtcaagaaattctatcatacatttgacaacaaactgtacaaggtgatgtataaatcgggtatgaataactatatcttcatctatgacggcgcaatggacgaggtgagactgaaatgaattggctgttaattgcggtaatatgtattattgcgtggaatgtggtgagaggctacacaagaggtgtgcttcgcatggtatattcgcttgcagcctggatagtaatgcttgctgcatcaaccatggcagccccatatgtcagggatcatatattatcacagacaggaatagagcccgtaattttaaacggtattgaaaaacaaatagctgcacagggacaaaaagccacaggagattttgatatggcaaacatattgctgcagcaatccggagcatacgacaccatatccgcacagcttacaaatgccattatgacaggtttgtctttttttatagtattttttctgctgggaatagtggcatacatagtccgtcacatcatcagaaaaatagaaagggtgcccgttattggcactgttaaccggattgcaggctttgcagtaggttttattaagggaatggtcattgtatggctgctccttgccctgacatcattatttgccgcatctgaaataggacagacaatgacagcatatataaatgattctatgatgcttaagtatctgtatgaaaacaatcctgtcataaagctgatagaaaatatactgtagcttaaaccggtgtaataatgcataaaagagaaaagtacataagcaataaatggtatgtggataagtatgtaaatacaatatatagttatgtaaaaacaatgagaaaaaaatatatataaaaaaataaaaaatgtgttgactttatgcgacacagatgatattatatcaaagctgactcgcgggacacattgagttgtagagcttgtgagttacaatttacagacatgactttataatattgctttgaaagaagctgattaaataagttatgaaaaaagttcttgacaaatgaaaaacattttgatagaataaacaagctgtcgcaagacagagaacttaaaacagagttcaaaaaaataaaaaagtgcttgacaaacgaacagcgatttgataaaataatcaagctgtcgcaagagagcaaaacaaagaacattgataactgaacagtgagaaaccttgaaagattttgagaatcaatcagaacgcttcaatgaaaattgaagacctttaaaacagtaaattcagattctatctgaatgaacgaattagccaagtttaacttgactgagatcaactttttaacatgagagtttgatcctggctcaggatgaacgctggcggcgtgcttaacacatgcaagtcgaacgaagcactttatttgatttccttcgggactgattattttgtgactgagtggcggacgggtgagtaacgcgtgggtaacctgccttgtacagggggataacagttggaaacggctgctaataccgcataagcgcacggcatcgcatgatgcagtgtgaaaaactccggtggtataagatggacccgcgttggattagctagttggtgaggtaacggcccaccaaggcgacgatccatagccgacctgagagggtgaccggccacattgggactgagacacggcccaaactcctacgggaggcagcagtggggaatattgcacaatgggcgaaagcctgatgcagcgacgccgcgtgagcgaagaagtatttcggtatgtaaagctctatcagcagggaagataatgacggtacctgactaagaagcaccggctaaatacgtgccagcagccgcggtaatacgtatggtgcaagcgttatccggatttactgggtgtaaagggagcgcaggcggtgcggcaagtctgatgtgaaagcccggggctcaaccccggtactgcattggaaactgtcgtactagagtgtcggaggggtaagcggaattcctagtgtagcggtgaaatgcgtagatattaggaggaacaccagtggcgaaggcggcttactggacgataactgacgctgaggctcgaaagcgtggggagcaaacaggattagataccctggtagtccacgccgtaaacgatgaatactaggtgttgggaagcattgcttctcggtgccgtcgcaaacgcagtaagtattccacctggggagtacgttcgcaagaatgaaactcaaaggaattgacggggacccgcacaagcggtggagcatgtggtttaattcgaagcaacgcgaagaaccttaccaagtcttgacatccttctgaccggtacttaaccgtatcttctcttcggagcaggagtgacaggtggtgcatggttgtcgtcagctcgtgtcgtgagatgttgggttaagtcccgcaacgagcgcaacccttatctttagtagccagcggtccggccgggcactctagagagactgccagggataacctggaggaaggcggggatgacgtcaaatcatcatgccccttatgacttgggctacacacgtgctacaatggcgtaaacaaagggaagcaaagctgtgaagccgagcaaatctcaaaaataacgtctcagttcggactgtagtctgcaacccgactacacgaagctggaatcgctagtaatcgcagatcagaatgctgcggtgaatacgttcccgggtcttgtacacaccgcccgtcacaccatgggagttgggaatgcccgaagccagcgacctaaccgaaaggaaggagctgtcgaaggcaggctcgataactggggtgaagtcgtaacaaggtagccgtatcggaaggtgcggctggatcacctcctttctaaggaaatcgagtagagagtttttcactgttgagttatcaatagataacagcatatttttggtggcgatgcgtttttgggaaacacccgtccacatcccgaacacgatggttaagacttaaacggccgatgatactatactggtaacggtatgggaaagtaggtggctgccaaatttatgggcttgtagctcagccggttagagcgcacgcctgataagcgtgaggtcggaagttcgagtcttctcaagcccactagccgaatggctttggataattaaataagttactcaaatgggggcgtagctcagttgggagagcacctgccttgcaagcagggggtcaagagttcgaatctctccgtctccatcgtcgatgtaataaaactgttacaatcgacattgtaccttgaaaacttcatacaaatgatttgatgaataaatattctattcttaagaatatctaacaatcaagacatccgagaaacaaaaccaagttgtgaacaacaacaaagttctttaagttattaatgatgcaacgctatgcatcgaagagattaagcaaagaagagcgcagggtggatgccttggcactaagagccgaagaaagacgtgataagctgcgaaaagctgcggggagatgcaaataatccttgatccgcagatgtctgaatggggaaacccggtacgaagaactcgtatcatccatacgccaatccataacgtatggaggggaacccggtgaactgaaacatctaagtagccggaggaagagaaagaaacatcgattttgttagtagcggcgagcgaaagcgaaagaggccaaaccggagtgcgtgcactccggggttcggaccgcatttaagattcagtgattctagcagaaaggtttgggaaagcctgccggagagggtgaaagccccgtaagcgaaaggagagctgactgagcgggatccagagtacatcgagacacgagaaaccttgatggaatgagcggggaccaccccgtaagcctaaatactacttagtgaccgatagcgcatagtactgtgaaggaaaggtgaaaaggaccccgggaggggagtgaaagagaacctgaaaccctgtgtttacaagctgtggaagttctttaaatgaacaaccgcgtactttttgtagaacggtccggcgagttgcggatactggcaaggttaagcacttaaggtgcggagccgaagggataccaagtcttaacagggcgttaagtcagtatacgcagacccgaaaccgggtgatctatccatgtccaggttgaagttgtcgtaaaagacaatggaggaccgaagccacatccgttgaaaagggtgggcatgaggtgtggataggggagaaattccaatcgaacccggagatagctggttctcctcgaaatagctttagggctagcctcgatttagtcttatggaggtagagcactgaatttccgcgggggcgtcaaagcttaccaaagaatatcaaactccgaatgccatgtagatgatgatcgggagtcagactgcacgagataagttgggcagtcaaaagggaaagagcccagaccaccggctaaggtcccaaagtgcgtgttaagtggaaaaggatgtgggaattcgaagacaactaggatgttggctcagaagcagccatacattcaaagagtgcgtaacagctcactagtcgagagttcctgcgccgaaaatgtccggggctgaaacacgacaccgaagccgtggactcgcaatgcgagtggtagaggagcattcttaaaaccgacgaagctgtaccgaaaggagcagtggagggataagaagagagaatgccggaatgagtagcgagagaaaggtgggaatcctttcggccgaatatctaaggtttccagagtaaagctgatctgctctgggtaagtcggggcctaagcacaggtcgcaagacgtaagcgatggataacaggtttagattcctgtaccacgcattatcagaactgtagggacgcatgtggaaagcacgagccgggaatggaaataccggtacaagcggggtaggtgtacgataggcaaatccgtcgtataatccgaagacgtgatgtggagcgaaataaagtagtgaagcgtgtgagccatgtgccgagaaaagctgctattgtgtaatgcgtgcccgtaccgtaaaccgacacaggtggatgaggagagaatcctaaggccgacggaagaagcattgttaaggaattcggcaaaatgaccccgtaacttcgggagaaggggtgcctgcgagagcaggccgcagagaataggctcaagcaactgtttagcaaaaacacaggtctatgcgaaaccgaaaggtgaagtatatgggctgacgcctgcccggtgctggaaggttaagaggagaggttagcgtaagcgaagctttgaatttaagccccagtaaacggcggccgtaactataacggtcctaaggtagcgaaattccttgtcgggtaagttccgacccgcacgaaaggcgtaatgatttgagcactgtctcgacaatgcatccggtgaaattgaagtaccagtgaagatgctggttacccgcgccaggacggaaagaccccatggagctttactccagtttgatactgggattcggtactgcatgtacaggataggtgggagacgaagaaggatggacgccagtctgtccggagtcgctgttgggataccacccctgtagtactgggtttctaaccagttgccatgaactggcaatgggacaatgtcaggcggggagtttgactggggcggtcgcctccgaaagggtatcggaggcgctcaaaggttccctcagaatggttggaaaccatttgaagagtgcaaaggcagaagggagcttgactgcgacaccgacgggtggagcaggtacgaaagtaggacttagtgatccggtggtataaagtgggattgccatcgctcaacggataaaagctaccctggggataacaggcttatcactcccaagagttcacatcgacggagtggtttggcacctcgatgtcggctcatcgcatcctggggctgtagcaggtcccaagggttgggctgttcgcccattaaagcggtacgcgagctgggttcagaacgtcgtgagacagttcggtccctatccggcgcgggcggaggatatttgagaggagctgtccttagtacgagaggaccgggatggacggaccactggtgtatctgttgtcgaccaacggcatggcagagtagccaagtctggaagggataaacgctgaaggcatctaagcgtgaagcccccctcaagatgagatatccctcctataaggagtaagaccccttgaagactacaaggtagatagggcagaggtggaagcatggcaacatgtggagctgactgttactaataggtcgagggcttaatcttgttaataacggagaaaacaaatcggatttgtatgaagttttgaaggtacaaacctttatatggcctagtggctcagttggttagagcgccgccctgtcacggcggaggtcacgggttcgagtcccgtctgggtcgtttatagtgagtctttattcatgattgcatgatgattaaatcagatgaatttcatttaacactcactacgagtaacgcgtgggatcttagctcagctgggagagcatctgccttacaagcagagggtcacaggttcgagccctgtaggtcccatttaactaattcttttattagttatgccgatgtggctcaattggcagagcagctgatttgtaatcagcaggttatcggttcgagtccgatcatcggctttatacaatttaatattgaattgtattatgggcagattcccgagtggccaaaggggacagactgtaaatctgctgcaacttgcttcgatggttcgaatccatctctgcccattactctttatagagtaactaaatactatcgcgggatggagcagtctggaagctcgccgggctcataacccggaggtcataggttcaaatcctattcccgcaactcgatgcgtaagcattgtgcccagttagctcagttggtagagcaacggactgaaaatccgtgtgtctctggttcgattccggaactgggcattttaatttattatgggatattagctcaggtggtagagcacttgacttttaatcaagttgtccggggttcgaatccccgatgtctcattgaaaaacgtctctcttagagaggcgttttttaatgcaagacatcggagggttcgaactccggacaacgtagttggtcggggcgctagacgtccgggggacgtctgttcagcgcggaccgaagcggagcgtagaccgaatccccgatgtctcattagaaaaagaaaaccatcactcgtaagagtggtggttttctttttctattgatatatggtgaattgaactccggacaacgtattttaattagtaaaactgcacaaaaaataattgaaaaattgtgcatgtttgttaacactttcagagaccaaggtgatactataataactgtaaaaaccccccaatacattatatattttttattatccccatagtaaaataccttctcctaaaagacagcagaacgatggctgtcttttttttgctctaattaaaaaaaagacagccaaatatttattatctattattcttttgcaaagtcgaaattctacagttgaaatgctaaaattacattataaaaaaacaccgttagatttacaccgtcagatttatattgcttcctgcccgcagagatgtgtagtaatcatcatatgacgagctgctcatctggcgtgagacacgatacagactgcttgtgaagtcattgtcatttccgaacagagaattaagagtgtctgcgtcggcttttttgacgagctcctcattagctttcagagtaccgtccttgtttattgtgatgccaatgtcctcaagctcgtcgctgtatttgcttgccagctttttgagctgcttggcataacgcttcatggaggttgaactgctgtttgaggcggaatcaatggaattattgtatgtgtcaacaagagccatgactgttccgcggatgttatcggtattttcgtcgtccgaatacttgtagttctttaattttttagctgcgcggtgcagggcggttgaatcatcgtaagcgagctctgtaatactatattctttgcgtttggatgatttcatggcatcgcggttgtttgaataaaaatttctcataaaatatgttgctgaaagatttgttgctgaacttactcgtgtactcatgttaatcctcttattatttttaattataactatgcagttactattattttagattttattttgaacgtataattgcacttaaatatttgttataaatattttatcggatatttgcacgaaaaagtttacttatgcgatcaaaagaagtaaaatacaaaggaatgcgtagaataagaaaaacgcgattatgcaatcgaaatgctaccaggcaaagagtaacagaacataatgtaaaaaacataatgtactaaaacaaaatgtaacaaacataaagttacaaaaaatgcaacagacataatgtaaccaaaggaggatatggggcatgagtaaaaaaactttcggtacaacatcaaaaggagtggaggcatcgctttacgaaatcagcaatggcggtggattgagagtacttttgacagactatggcgcttcagttgtatctatttttgtaaaggacaaggatggcaatgagagagatgtcattttaggatatgacaatgtaaagtcatatgagaaggagtacagctattttggtgctactgtcggcagatatgcaaacaggatatccgatgcaaagattaatattgatggagtggaatataagcttgaggctaatgacaatgagaacagtcttcacagtggatcaaatggtttttctaagcgcttttggactgttaaggagcagaaggcagatgagattacctttgagatagaggatgcagatttggagcagggcttcccgggaaatgcagtcgttgatgtgacatttaaggtaacagaagaaaatgcacttgctattatatataatgcaaaggcagataagacaactaccttcaatatgacaaaccacagctatttcaatctgaacggtcatgcatcaggaagcgtatacactcacacattgcagataaatgctgagcattacacacctgtaaaggattccaaggctattcctacaggtgagattgcaccggttgagggtacaccatttgattttacagaggctaaaccaatcggaagagatatcgaggcaaatgatacacagcttcattatggaagcggatatgaccacaattttgcaatagacaagaccgctccgggagtagaaaaggtcgcaacagcatactcacctgagagtggtatacagatggaggtatacacagactgtgtcggaatccagctttatactgccaactttatcgtgggacaggaaggcaagggcggagtcaaatacaataaccgcgatgcattctgcctcgagacacagttctatccaaactcaataaatgagactaacttcagtacacctgttacaaaggctggcgatacataccacacagagacagattacaaattctctgtgagataaaatgccaacataagagagatacagaatagttaaagcccaccatattgatgaaatttatcattaatatggcgggctttcttaagctttgtttaatcaaatactgatacagtggttttatttccggaaatgtggtataaatatatttatatgtatgaaatgaacgtatgattacatttataaattgcgctaatactattatgttaatgctattatgctagataatttgttagtatttaaagcaagctgtatttttagtaatcataaacattggcaaataaagattaaaattgtcaaataacaataaatagtgataaacattgataaatatagataattattgagatgacttcgcacacgcaaaactgcattatcgctggcatatggtgtgttccgaagaaatatatgaactgccacaaggttccattaaacttcggtaacaatagaaagtagattgatataacagactatccggatacattttgtggctgacttcatatatttctgaggaatataccatatgccggcgcaccctcacagcctgcaggtgcgaagtccctacccccaaaaataaaatcgaataaatatatagcacagaggaaacaaaccatgaaaatagtatttttagattccaaaacaattggtgacgacatcgacctttccgaatatgacaagctcggagaggttgtcaaatatgatttttcgacaacagaggaagcagcggagcgcacaagggatgctgatgtgattgttttaaataaggttgaggtaaatgaaaaatctataggacaggcaaaaaatttaaagctcgtatgtgtaactgcaacaggcacaaacaatctggataaagaatatctggcaaaaagaggcattgaatggagaaatgtcgcagggtattctacagagaccgtggcgcagcatacgtttgcactgctattttatctgcttgagaagctgagatattatgatgattatgtgaagagcgagaaatatgtgggtgatacgtcgtttacgcatttttccaatgtgtttcaccagattagcggtatgacctggggcatcgtggggcttggaaatatcggaagacgcgtggctgatatcgcaaaggcttttggctgccatgtggtttattattctacctcaggaagaaactcgcagccgggctatgagagggtggattttgatactctgcttgccacgtctgatatcgtgtcggtgcatgcaccgctcacagatgatacacttggtctgatggacaaggctgcgtttgaaaagatgaaaaaatctgcgatatttttaaatcttggcagaggtcctatagtgaatgaatcggatctggcacaggcgcttatggatggagagctggcggcggcaggtcttgatgtgctggcgcaggagcctatgagtgaggacaatccgctccgtgcgataaaggattcaaacaagctgattatcacaccacatattgcgtgggcaagcgttgaggcaagaacaaatctgatgcacattatatacagtcaaattgaggacttctttactaattaggaaatataatttaaaatcaaatcgcaacattaagaggcagcattaagagaaagcattaagagaaagtcttaagaggaagcattaagaggcaacattaagaagcattattaagaggcagaaatgagcatcaaatttgagataacaaaacaaaacaacatacattttggaattgcagcagcagcggccgcgcttgtaggttactttacatcggcgagctggtgggtgattcttttgtttgcggcagtatattttggacttgtaaatgtgaagcttgagcttccggtgaagctttcgtggctttgggctgcgatactgcttgccatcggagcgatactatctgttttttcggtgcagtatgtgctgctgacggatgaggactttgtgaaaaccaccgatatggtatgcgtggtgaatatggttctggcgctcgctatatatctggtgatactttttatcacaaacaacacgaggcttacatgtaccatagcatcaattgccatactcgcgtttggatttatagattattttgtctatgaattccgtggcaatgagtttacgtatgcggatttgaagtcagcgggaacaggactttctgtcgtgacaaaatacaaattcgtcatagactacaagtttttgtatgtgattctggcggctgttttgtatatcatgctggtaaggcgcatagaagtgcagttcgagtcggctatccatatgagaattatttcgattcttctcacaataatatgtgtgctgtatgtcattatgaattccatgtcactgaacaccgagacctgggagaaaaagggcacgtacagaaacggctatctgctgaactttgtgctcggcataagggacagttttgtgaaggcacctgatggctacagcaaggcagcagttgacaagatagcagacaattttaaggaaacggacggctcatattcgcagtctgatgcgaaaaatccgacaatcattgttatcatgaatgagtcgtttgcggatttgtcggtggtgggagattttgagaccaacacgcaggttacgccgtttatggattctctgagtgaaaatacgcttaaaggctatgctctttcgtccgtgtacggtgcgaagacgccaaactctgagtgggaatttgagacaggaaactcgatggcatttctgccggacggctcggtggtttatcagcagtatataagtgatgacccgacctccatagtctcaaacctgaagaatatcggctatacgacggttgcgatgcatccatactatgcgacaggctggagcagaaacaaggtttatccgcatctgggctatgatgagacttactttatagatgattttgaccagacaaagatactcagggaatatatcactgaccaggagctctatgataagattattgaccgctacgagaaaaagagcgatgacgagaagctttacatcatgggtgtcacgatgcaaaaccatggtggctacggtgagagatatgacaacttcaaccaggaggtttacaaggttggagcgtcatacaccgatgcgaaccagtatctgtcacttttgaatgagagtgacaaggcgctcgaaaatctcatcacatactttaagggtgtggatgatccggtagagattgtgttttttggagaccaccagccgggattatgcaatgattttatcaagcttttaaatggcaagggcaattccggacttacagagcaggagcttgaggatctgtacaaggtgccgtttttcatatggaccaattacgagacggatgcacagaaagttgatgtgacgagcctcaactacctgtccacactgacgcttgagagagccaacatagatctgccggcatacaaccggttcctcgcagagctgatggagaagattccggccataaattcaaggggctattattcgaaaaagaatgagtgttttatgcatgtggatgacgcaacaggagacgaggcaaaatggataaaggcatacaatatcctgcagtacaattcgatgtttgacgagaaggacagaagctcgctgctgtttccgtacctgaaataatgtgatgatttgaagcagccataaatacacatatgagaaaatgaattaatataactattcagggagctaataatgaagctaagtgatttattacaatttgataacataattgtgcaatgtcatgataatccggacgcagatgcactggcaagcggttttggagtctatgaatacctgaggctgaatggaaaaagtcccagacttgtatacggaggcaggaatatcatacacaagagcaatctggtgcttatggtagacagtcttggcataccgatagagcatgtggattttttagacaatccgcagctgcttgtgactgtcgattgtcagtacggtggtgggaatgtcacatttttcaaggcagaaaatgtggctgtcatagatcaccacagagtatcgggacagcttcctgctatgaaccgtgtcatgagctatatgggctcatgtgcaacaattgtgtgggatatgctgcgtgaggagtgcgtagagataaatcgaaacctggcaacagcactgtattatggactttacaccgacaccggagaatttaccgagataacacattcgcttgatagggatctgcgcgatgaggcggattttgacagcactatagtggccaaattccgaaatgccaacatgtcacttgaggagctggacatagccgcaacagcattgctggggcgcgattatatagaggaatatcgtctggcgatcgtaaaggcaggggcatgtgacccaaatgtactcggcatcataagcgattttgtgctggaggtggatgctattgacatatgtatggtattttcagtgattaagaatggagtgaagctttcgtttagaagctgcataaaagaggtgagcgcgagcgaaatggcgcaggaagtgtgcagggacataggctccggcggaggacattattacaaggccggtggatttattccgatggatctgctgatagacagctataatgtctattgcagagaaaaagacttgacaccaagatttcagtacagcagcgatggtacacgcaaacgtccttcggattctgcaatcaaatcattattggaagagaggatttttgattatttaaacgatacaaagataatttacggagaagattttgatacgagtggcttcaaaaaagtggattataaaaaacgcccgataccgatgggatatatcattgcaaaggatatactgcctgtgggctgctgcatgggagtgcggacagctaagggggatatctccacaccggttggtgaagatacggtagtcataataggagaagacggcagtgtacggattttaaatctggacaggctgaacaaaagcttcaggatatacaaggactggcggtttactgtgaaacagacagattatgtcccaaagttcaagaataaggatacggagactatagtggatggaatagcacatgccagagtgtgcatacctgttgaggcggatttttcaagggcatttgtgctaaagcacaaggtaaagctatttaagaataaggatgacagcagttatatatcaggcagacctggagatattatggttctgccaaatgatgataggaatgaggcatatatgataagcaagacagaatttgaaaagacacatatagcaaagggtgaggaggaaaaccgtaaaaaagcggtcgttttcgaccttgatggaacacttctctatacactcgaggatttaaaaaatgcaacaaactatgcattgaaacaaaatggcatgccggagcgtacactcgacgaggtgcgcagatttgtgggaaacggtgtaaagcttctgatggagcgcgcagtgccacagggggcagacaatccaaagtttgaaaagacattttcggatttcaaggaatattatgaggctcattgcaatgacaatacagcaccttatgatggaatcatggagcttttaaaggagcttaaattaaacggcataaagcttgctattgtttcaaacaagcttgacccggcggtaaaggagctcaatcagctttatttcaaggagtatatgacatcggcagtcggcgagatggaggaagagggtatacgcaaaaagccggcacctgatatggtgcagaaggcacttaaagagcttcaggtgagtgcagatgaagcaatctatgtgggggactccgatgtggatatcgccacagcgaaaaactcaggtctggagtgcgtatctgtcacatggggcttcagggacgtagagtttttgaaggagcatggtgcaacaaatctgatagatgaaccggtcgaattgttaaattacgtataatcaggagaactttgatttatgctttcagaaaagggattattgataattgaaaagctggcagagcacaacaatgagcttgtcacatcaaaggctcttgctgcgtccacaggtatgtcggagcgaagtgtgaagacatatctgaaggaggtggctgatttttgtgagcaaaactctatgacgctcgacagaaagccgggcaaaggcatgaagccgtgctttagcgatgcgcagataggaaagattctggatgtggcagggcggaaatcggcagcagtatcgcagaagaagagacagaactacatatcgtatattctgctaagtggctgggatacatacacgtatgcgcttttttcggaggagttaaacgtcagcaaaaatgtcatcatggatgatataaatgagcttgacgcagagcttctgctctttggcattaaggtgcacagaacggcgggttacggaatatatgcgacaggcagtgagcttgatatcagaaaagccatgaggcatttctgcaggtatccaatcagtgataagcaggttatcaagaccgatgaccacaggctttcaagacgcgcggccgaggtgatagccaataatttcagaagcgtaaatctgtcgatggcagttgacatgatacatcatgtggagagacgctttgatatcatctttacggattacacatttcagatgctggcagagtatatagccattgcacttttcagggtggatgtggagaaagagctgaagccggatgagttagatttgtcaaaccgaatgcgtgatgatgcaaatgatggggatgcgggcaccgaaacagagcagcaggtacagaaaaatggattcgtaatgacagagcatgagaacatggcaaaggaggcagcaggctttctggacagacatcacggcatcagcctctcacagcctgaaatcatgtatctggcaatgcttttttcctgtgccgagggacaaaaccgtgttgtcatgtcctgtgaggaggcacttagcatagaggatgagatgatagtgtatctgtcaaatcttctcgcagccaatctgattgaaaatgagcttctacgtgagagcatgcgtagctttttaccgggctccattgcgaggactcatttcggcatagagatagacaatccgtttctttccgatatcacacaatcgtatgccagtctctttacggtatgctttacagtatcgagatactacgaaaagtacacaggtgccatgccgagcgaggatgagatagcatttattgccttgcaggtgggcggagccctgcacagaaatcctatgacagtgcgtgcagtgttaatcggtgcagcaggctatgcgaccggcagtataatagcgggcaaaatagaaaacagggtgccggatgtaaggatagtaagcattttgtcgtcagaccgcatagagcatattgacgagtatgactgcgacctcatactctcgaccatagacacacaggcagatatccacaaggatatgagatttctgtatgtttctccactaatcagtgcgcaggatgagaaaaatatcagaaacaagtgctttgagctcatgaccggccagagcgcggaggtcagcgagttttcacatatgctgtcggaggaatttatcatatttgagaaaaaggcgaaaaaccgcaaggatgttttaaagcgcgcgtgccagcttctcataaacaaaggaatagtgcagagcgagtttgcgagggatgtactggagcgtgagaaggtggaggcaaccgctgtgggctgcaatatagccataccgcacggaaagcctgagcatgtaaaccgttgccagatacttgttatacgtctcgacaagccgatagagtggggcgagaggatggcagacatgatatttctgcttgcgataaactttgacagtgtcaacacgacaaaggcatttttccatgacttcacgaagcttctgaatgaaaatggagcgactgacaggctcagggaggctgcttcacctcatgagctttgtgcagctatccggaaggagctgggatggaactgaagttgtagaacgatttattaaaataatcagcaatgaaattataatgaatgaaattgtgataaaaaaagtgataaaaaaattatttatatctattgacaatatgaatataaatatatataattatgacataaacaatttgggcaaaataagggaaatcttatgacgcaaagctagagtctaaaacattgttgttatgacagttcggttgcaataaaattttaattttattgcaaccgtttttatatatgggagtatattgaaatttttaaatcttatttatgaggttatgaaagtgtatgtaaaattaatttacatagataaggaaatggtcatgaacatttcaacataagaagaatggagggaatgcagatgatacatgtaatcgtaggcggtgtaattgttgcaattattatcgttgcatcaaaaacaaaggtatattaattgaaaaagggggcttttaagccctcttttttatatcaaaaaaattaaaagtaataagaaaaagtaggtgataaaaatgagcatagtggtaaatgtaaaagacttaaaaaaagaatttaaaatatcgaaaaggcagcgaaaaattcaacaatgcagaacaaatattgcattaaatgggctttcttttgaagttaataagggagaaatatatgctcttttaggaacaaatggagcagggaaaacaacaacattaagaattctatcaactttactaaaaccagatgatggaaaatgctatattgatggtgtgaatgtatcggaagaacctgataaaattcgaagtaagattggttttcttacaagtgaattgaaattagatggcttttttacaccaaattatttatatgattttttttctgatttatatggtgttaaatcagagttacgtatagtgcgtaaaaaggaattatttaatactttaggtattgataaatttgcagaagtgaaagtttctaatttgtctacaggaatgaaacaacgagttgcaattgcaatatcattagtacatgatccagatataattatatatgatgaaccaacaaatgggctagatattgttagttcgaaaatggtaattgattatttaaaagaattaaagacaaatggaaaaactattataatttcaacacatatatttgaagtggttgaaaaagttgctgatagagtaggcattgtaataaatggtaaattggaatatgaagatagtatttcaagaataaaaaaagaaaaatcattagaggatgttttttttgaagtgtattatagtaaagaaggagaacactaatgagtaaaatattaattattgttaaaaaagaattattacgaatactaacggataaaagactatgttttacgactattattatgccgggattgatgatttttataatgtatgctttagttggaaatgtgatgagtaatacatacagtactttacagaatagtgaatatactgtagttataaataatgttccgaatgacattaaagaactattattaaaaaataaaatttcatttaaagaaaaaaataaaccccaaaattattatatgaataaaataagagataaaaatttagatttatatatagattttgataagaattttgaagataatattttaaatggaacagaaaaaggtgttcaagtacctagtgtttcaatatattataactcacaaagtaattcctcgaatacaggatatatgcttttgtcatcaatattaaatgaatataaagattgcattcgaaatgtattttatgtaaattctggaaatgacctatatgatttagctacaacaaaagattcaacaggtcagtttgtatcaatgatattaccaatgttacttattaccatgctttttagtatttgcgcatcggtggcccctgattcaattgctggagaaaaagagagaggaacaatggctacactactggttacacctattaaaagagagcaattggcaattggaaaaatacttggattaagtattattgttgtgttagggggaatttcaagttttataggtgctatgttatcacttccgtttttaagtattggacaagatgagattgatacatctgtatattcaatcaatgattatttggagttatttataattgtaatttcaacagttttaataatgatatcattaactgcaatagtatctgtattagcaagatctattaaagaagcatcatcatctatggctccgcttacaatactggttgcccttgtaggaatttcagggatgtataatcaaaatggtagtaatagattaatacattatataattccattgtataatagtgcgcaatgtatgaatgagatatttttgttcaatggcaacataaatcatgttataataaccgtaatatcaaatttgttatatacaattattttggtatacattttatctaaattatttaagaacgagaaaataatattatgaaatcagattacatttcagacttgattattatagctctgctttgtgttgggtacatatatataaataatcgtatatcagaatatcagggcgaaacatacttgtggaaaaaactgcttggtgaatcggaaaagaaaataataattgagtttaaaaagaaaaacatattggttgagagtctgtttttgttggtatttgcagtgataaatatatcaggtgatattttaaattggctgataagcattattaatattgtgatattgataaataatatgctattgctaatgtttagaagaaaatactgcagaaatatatccgggaaaatatttatgataatagcatatatttattttatttggattttctttacagttattcaggcaatagttgcaggcggtgaagtatatgcaatcgtcattcgtatagtaaaaacaaagtgtataggcggtgtggcggaggtgctgaaacatccgccaatttctctatttttgataaatacaataatgtgcctttatctggtttatacagtgtcaacttatgataacagagtgtgctcaaaagctaattataaaccgaaaaaaaggtgtattagtttatctcaaaatataataatgattctggtaatatatgcggggtatatttttcttgctataaatatttcacaaaacgcaaatgttttttctgtgataacatgcatttttgctatattactgagcggatgcatagaagattttttccgagaggatatctgcaacagacagtggtacaggcttttaggtgaaaaatatagtggcttatggtgcaaaaaaatgatggttgagctgaaaatccaatttgtcgtatttgcggcatatctgatttgtgcatttatacataaatatgatgttaaaatcgtttttatggttttgatttatatggtagaatgtggactttgctgggtgacatattttgctttatattatgtaaaaatgaaaaaaagatatacaactttagaaatgatgaaattgtatgcggcaatgttttcaattacagttccggggataaatatattgttatgtgcatggtggtatgtacgaggagccaggaggtggaatgaatatgttagagatttgtaatctgacaaaaaaatatgataaggaaaagggaatattcgatttgagctacagttttgaagagggaaaaatctatgctcttgtgggacctaatggggctggaaagacaacactcatacagatgatttccggtataagtgagcctatgaaggggcagataaggcttgatgatcaggatacattgttgcggaagagtaaatcacagataggttatgcattggaattgactggaaataatacaaaacagacagttttacaatttttacggatggtgtgtgatattaagtttggaggagaacataaagaagatatcatgtcatttctgacagattttgaattggaagacgataaagatacaaggctgtctgagtgttcgctgggaatgaagaagaaggttggcataatagcatcatttataggttttccaaagcttattttattggatgagccaacgaacggagtagatacaactggtcttatagtcttgaaaaaatatattgagtctgccagggaacataactgtattgttataatttcaagtcatgtacttgattttgtggatagtgttaaggatgaaataattttcttgaagaaggggcatcttgttgtaggaaacaaagctacaactgaggaacaatatagggctctgtttatgtaaatatcacattaatacaaaattgcaccagagatggtgcaattttgcattttggggaatattgaaaaaactcataccgcacagtacaataaaaccatagaaagcaacggacatatggcaggctgatgaatagcagagggcgatacagttaatcatatgtgtgagcgaaataaacaaaccaataattttaaattcaggaggacaaaactatggtaagcaagacaatggtagtaaaagcagcagagggacttcacatgagaccggcaggagttatcgcaagagaggcaggcaagtttgaatcagatgtaacaatcgtattcggcgacaagagaatcaacgcaaagagccttgtaaacatcatcgcagcatgcatcaagaaggatgcagagattacattcgagtgtgagggagctgacgaggaagcagcacttgcaaagatggaagagctcgaggaaaacaacttcggagattaatcaaccagcaaagtcaatcggaggtgtgatatgtacaaaggaatcgccggctcagaaggaatcggaatcggaaatgtggtcattatcgaagagcatgagatagtgattgagaataagaaaattacagatacagacgctgaaatcgcacgtctccagggagccattgagaaatttgtaaatgatacaaacgccatggcagacagaatggaaaagacagtcggagcaaaggatgcggatatccttcgcggacatatccagatgcttcaggatccgaccatagaggagcagattacagcgctcatagtaagtgagaaaatcacggcagagaaggcgctcgaccaggtgcttgagcagacagcagagatatttgcacagatacctgatgagcttttgcagcagagagcaacagatttcagggatatcaaagccagaatccttaagattctgcttggaatcgaggactatgatatctcagcagctccggcaggcacagtgctcgtggcacatgacctgacaccatccatgacagcaggtatcgtggcagagaatatcgcaggaatactcacagaggtgggcggcagaacctcccactcagcaatacttgcaagagcaatggaaatcccggcagttctcagtattgatggaatctgcacagctgtcaaaaatggtgacagagtggtactcaacggaacaagcggagaggcaatcgtaaaccctgacgctgagacagagcagaaattcgctgggctgcttgaggaatacaaaaaagagaaagagctcttaaagaaatttgcgggtgtgccgacagtatcagcagacggcacaaaggtagagcttgtatgcaatatcggaaagcctgaggacgcaaagaaagctgtagagtgtgacggagagggaataggacttttccgtacagagttccttttcatggacagagacacaattcctacagaggaagagcagtttgaggcatacaaatcagtagcagagacaatgaagggcaagcctgtcattatccgtacactcgatatcggaggtgacaaggaaatcccatatctgggtcttgagaaagaggacaacccattcctaggctacagagctatcagattctgtctccagagaacagacatctacaatacacagcttcgtgcacttgttagagccagtgcattcggcaggataaagataatggttccgcttgtgacatgcgtagatgagcttcgcagtgtaaaggcaatggtagctgacatcatgaaagagcttgatgcagagggcattgcatacaacaagaacctcgaaatcggtatcatgatggagacaccggcagcctgcatgatggcggatgtgcttgcaaaagaggcagccttcttcagtatcggaacaaacgacctgacaggctacacaatggcagtagaccgtggaaactcaaaggtagcatacctttattcagccttcaatccggcagtgcttcgcgcaatcaagcgtatcatcgagtgcggtaagaaagagggaatcatggtaggcatgtgtggagaggcagcagcagatccaaagctcattccgctgttactcgcattcggacttgatgagttttcagtgagtgccacaagtgtgctcaagaccagaaagaccatcgcagacagcagcatggcagaatgcaaggcattggcagacaaggtaatggcatgcgctacagaggcagaggtacaggcagtgcttgcacagcagtagatgctaaatttaaacaagtataaaagttagtaaaaaagtataaataagagtaaaatataaaagtataacattgaaatttattataaagacggctgaaccggtggggaccgggacggccgtcttttttgtgtatacgaaatgaaagataaatatttagttatttacgatttagttatttatgattaactaaattacgattgactaaaccatatataagtaataaaatattgtgtatagaaatggagggagaagagctatgtttataggaagagaaaaagagcttgcaactttaaacggattatataattcggataaatttgaattcgcagtaatctacggcagacgaagagtggggaagacagctctcataagccattttatacaggataaaaaagcaatatattttatgggagtagagagcaacgaaaagcagaatctggagaactttagtcaggcaatcatggaatatgcttcaggaataatgccggggacttcatttgtgtcatttcaggctgcaatagaatatgtatttaaattatgtgaaaatgaaagactggtgcttgtcatagatgagtatccatatgtggcaaaagcttcgaaaagcatggcttcaaccttgcagatgcttattgataaaaataaagataattctaaaatgatgcttatattatgtggctcatctatgtcttacatggaagataatgtgctggcgtataaggcgcctttgtatggcagaagaaccgcccagatgaagatacttccgtttgattttgaggatagctgcaaatatttcaacggattttcagcagaggatatggctctgatatatggtattgttggtggtactccacaatatcttttacagatgaatgacagcatgagtgtagaggataatataaaaaatgtgttcctcaacccagcatcggcaatatttgaggaacctgaaaatctgttaaagcaggaagtccgtgaacctgctgtatataatgcaataataacagcagtagcaataggcagctcccgtatgtcggaaatcgcaaccaagataggcgaaacgacaagtgtatgctcacagtatatgaaaaatctgattaatcttggcttaatacggaaagaaactccatatggcgaaaaggagtccagaaaatcaatatatgtgatagctgataatatgtttagattctggtatcggtttatacctgataataattctatcattagcagaggtgcaacagaacttgcgtataaaagaattgctccaaatctgtcagattatatgggcaggatatttgaagaaatatgtatgcagtatctgtggaaattattgattaatggagaagcacctgtggaatttaatgatcttggacgatggtgggggacagatccacaagagagaatacagacagaaattgatataatgggtgatcaggataaaagcactgcattgtttggagaatgtaagtggataaatgaaaatgtggatgtaaaagtgctcgaaaagctgaaaaagaggagcagattatttagatatgagaatgtccatttatttttattcgcgaaaaaaggatttacccaagggtgcattgaggaagccggaaaaatgggaaatgtatcgctggtgacatatgatcagatatatgaatatttaaaagatagagggataactgctttttaagtatatatggattttttactgaatttaatcaaagttgaggatataagatgtacaagatattaatagtcgaggatgatgaaacaattcgtaatggaataaagacattattagaattacagggatattatgttgatattgctgtaaatggtgtggacggtttaaagaaattcgatgaaacatatagcctggttattatggatataataatgccgttgttatcagggatagatgcctgcaaaaaattgagggaagaatcaagtgtcccaattttatttcttactgcaaaatcatcagaaatagatataatgcaaggctttgaagtgggcggtgatgattatcttgtgaagccgttttccaatatggagcttatatcgcgtgtcaaggcattattaaggcgtagaaatgtatatgatagagaaataattgatgacaatgcaggaaatgaatatatagacagaaaagatataaggatatacgaaaataagaatagagtagaagtgaatggcataggtgttaaatttacacgaaaagagtatgaaataatcaaattgcttgcaaaacatcctgatagaatatatacacttgaggtgatttattcaaatatttgggaagaactgtatacatataattcgggaaatacagttatggtacacataaaaaatataaggaataaattctatgaaatatgcaaccgggctgtcatagaaactatatggggaaagggatacaaatttgaaaagtgattttaaagcagtaaaggcagttcaaattatatttggtgcaataatattatcgtgctgtatatttggggggatatatggcatagggataaatggtcttactattttttttaataattcaagatatatttatgaccatgaatctccatatgttcaggaatttcaacagtatgtgtttcagaataatatagccacatcagatatatcggaatgtgatgaatggatggattatcattgtgttttgttttgcattatagaaaaagatggagaagctgtatatagtaaattgaatgtagataaatttattgtatcagcgaaaaacatgtatgatagtagaaaaattgctaaatatcaactaccggtaaattttgctgacggagaggctaatgtatatatatatgccggatatactgaaaagtattatttaggagccataattttaggcattgtaatatcaatcttaagcggagcttatgtaatctatagatgtgttaataatatcataaaagattataaagtaaatattggtaaggcacatgagcaggaacggaaagcacgggatgaaaaagatcaattgatgagaaatatggctcacgatttaagaacaccattaacgggattgatgacatacattgatatcttaaaattgcaaaacaaatcaaatgagagcattaacaaaaatttggatattctgacatctaaagttaatgaattaagagatctttcaaatctgttactggatttttctattgcaagttcagacgagaatatacatttggacgagccttctttcgtagaatatgcaataggagattatctttctgaaatgcataccattataagtcagaatggtttttgtgttaatattgatggcatttattgggaaaaggttaaagttgctgtaaatggaagtttactatcaagaatatttagtaaccttactaataatatttgcaagtatgctgatattgatgagcaagtggtcatggaaacagtatattcaaaaaatatatttgaaatatgcataagcaacacggtgtgtaaggaaaaaagcttattggagagtacaggattaggactaaaaaatgttgagctgttgatgagacgtatgcatggcagagcaatttacgaaacaaaagaatactgctattatgtaaaattgcgatttccgattacgaactgaactacaaacttcagaaatctttagaaatttttagaaaatttcagaagttcctttctttttctttaaaatattgtgatacgatttttttgtagatatctataggaactattaataaataaatgaaaacggaagaggaaaatatgctatatataaaaaagtattcggggtttattatttccattgttattggactgctcctttatgaagaagcaaattacgcatatacatatagagctgcaactgcttattctgatcatatgatatacagactgatacttagtatgggatccggaagcagtggctggaatggaatcctctttccgatactggcagcacttcctatgggaatatcatatgtcagagaatatagaagcggatatttgaagctgcgcctgcaaaaaatgtcaagaaacaggtatgttgttgtaacattaatacaaaacgcaatacttggcggcttggggttgcttattccgtatgctgtatattgtctgcatttatattttcagtatggaactaaggcttacttgaatataaaagagggagagacagttattatgtttcatcctaagctggcagcctcgaatactatagcatatgtttgtttaattggtgcgtttgttttattggcaggagttacatttgctacatttgcaatcggcatatcggcatggattaaaaacacttttctgacactgatactgccatttgtcctttgcatagccatggcaatattgataccggataacagatttgatctgcttttaatatttgcgcctaatggatatgcatgggcatctgttccgataatattaattatgtcaggtatattgattttaaccggtatcattttgtttgcggtaggagtaaaaaataatgaaaagtagatggttgtatttattaataactatattcattatttttagctatatgcaatttgaatatgttcgttattgtatggaatgtgatgccggatatcaggagtattcatatgccaatgcagttataaatatcgttggagacagatatttaatattgcttgtcagcgggattttaattgtatggagcattgccggattattggcggttacacggaataatttttatcttaaattgcggattggaagtgaacatagggcaaatgtcattgaagtagtgtatgcattcaaatacgcggttatcattgcagttatccagtgggtggtaattaatatgattgctgttgtaaataatttttataatgttaagtcacagatgcttcatgtgacaaacgtgtatcagctatttggaaacttattgttattttactggttgcttggttgtattaccattttatttaacaaattgataaatacaggatgggcagctaatatttgcagtattgtgtgcctgcttataaatgttgttatcagtaataggataagctttaaagattctttcgttggaagaaaatcatggattgcacatttgatggttacagatgtgaaaacatatagtttttatattgtttattggtttgtaagtattgcgtttgtaataatggttatattttatagggccgttatactaaactgttttaaaagactgattgcaatatgtgttaagtcatattatggtcttacgtttatggctgcagttgttatatggagcatatacggatttgtttcaaaacaatatatgtcaggcattacagactattttgccggatttaaaaagcttgatatttttttactgctatatttgttttatcaaatgccaatctggattttattgtattattttttgacaaagaacttttcgttttactatattcagtttgccttgagaaaaggaaatacaattagctggatgaagcatctggcgataatatttctggtatgtacttatctgtattacggagtgggaatgatggtaatagcatttatttcgggaacggtaataaatgtaaatttgataatggaaatgagtaatatgattttacagacaatagccttgttactgctggtatttctatgctggttgcatgaagccggagataaacatatgggatttataataattactatatgccatattgtggcaggaacattattttcgtggcttccgcttacacaggggctgtatatttcacatatgacatctcagcctgagtgtatggtatttcaaatggcagagtgtcttgttataggaacgggcgttgctgtaatattaaaaaataaacaagagtatataattttacgtaagtggaaggcagaaaatatatgaatatagagctggataatgtatcaaagaattttaaaaatcagaccgtgttggaaaatgtaaatttaaaattggaatctgggaaaatatatggtctcgttggaagaaatggtagtggaaaaagtgttttattgaagataatgactgggttaatggagccgtcggatggaataataaaatacggaggcatccctctgaaaaaaggacagtatgcaaaggatgttggaatagtgctggactgcataggcttcatgccggagtatactgcaaaggaaaatttacttttactggcaaaaattaataagaaaacaggagaagaaagaatcaatgaaattctcaaacaggtgggccttgagccggattccaaaaaggtttatcgtaagttctctttaggtatgaagcagaagctggcgatagctcaggcttttatggaagagcctaaggtattgctcttggatgagccgatgaacgcactggatgaacagtctgttcaggatatgagaataatgtttagggaatatgtgaataaaaaacctgctattatggttataacaagtcaccataaggaagacatagaaattctgtgtgatcaggtttatagtataaaaaatgggtatgtgaatctttaggtttctttagaattatttataattcttaaatgatttttcagctaattctttatatgtatatagtattgtaaagccatagatgtctatggctttttaaatgtttggtagtattgaggagatgggatatgatagaaacagctattatatatataaaaagaaataaaataaaatcgttgattatcatactgattatcgcgacaataatcctgggtgaaattattggtctgctattaagcaatgcctcggaaaaatctgagagagatgcatatttatataatggagccgccttagtaattgaggatgataatggaggctttacaaagagtgattatgatgaaatcagaaaagtaaaatatgtaacaggacttggggcgtggagagagctgattgcagatccggtggatacagagaatgtaaaggaacataaaggaatagatccggagaataaagatgtaagcaatcgggctgataaaatggtaattgttgcaaatatggatgtgcaaaaatatagcttgttttcatgggaaaagaatgtttctcttattgaaggggaatttcctacttacaaaaataaaggaattattgtagaacagcgatatgcgaaaaaaaataaccttaaggtaggggatgaagttaaatatactataggagaccaaccggaggtaacgtctttacaaatatgcggaatttataaagtggacagtgacttcgaaatatatgactcaaatgaagagggaacctcggtatacatacatagtccatataattctatatatgtagattatgattatattgtagagttactagggttagagtacaccgcgtcaacgggaagtgaagtgtatattgataagatagagcatatagatgcggtaaaaacccagttaaagaaaatgtatggagataatgtggaaatatatgataatacttctaattatctcgattcagaatgtaaagtcgtaggattgatgggaaaaacatcaaaaataatttgctggatgataattataatggggggaattgttttgttgatcattttctcgttttatactatccaataccaaaaagatacaggactttttatggtactcggaaggtcaagaaaatggtgtataggtagatttgcatttataggaatgatatatgcaattagtggtttgcttttgggtgtgctattatactgtgtgcttggcaatttcatatgtagcattataagtggtataggtaagaatgtcataattaatagtacagacagagctataggtggatatgatacaccaggaatatttcaaggctttgaggtgcgtatagaaatgagtgctttttttactttgaaaaacattataattctattaataatttcgttggttaattggattacatttatggtactgcctgttgtaacaactgttgaagaaaatgcaaagaaactgttaaattcgaagggatagtggtaaatatgttggaaatgattaatgtatcgtatgcatataaatcaaagaaggaaattgtgcatgtactggataaagttacatacagatttgaaataggagaaatgtatggaatatttggtccgtcaggttcaggaaagacaacgtgcttatcgttacttgccggtttagaaaaaccggatgagggggaaattttgctggagggagaaaatatacaaaatattggtggaagaaaactgcgccaaaacagtatatcattggtttttcaggattatcagttatttgattatatgacttcccttgaaaatgtaatggttgcagcccagataagcttacctgatgtacccaaaaaagaattgataaaaatgtgtagagacagccttgtaatggttggacttgatgatagtcagataacccgaaaggttacggaattgtcaggtggacagcagcaaagagttgcaatagcgagggcgttgataacagatgcaaaatatattctggcagatgagcctacaggaaatctggataaagaaaatcgaagaaaaattgtcgaattgttacagcagatagctcatgaacaggacagatgtgttatagtagtaacccactcggattatgtaaagaaaaaatgtgatatttgctatgaaatgggagatgacgatgaggaataaatggtggcaggcatgcaaagaattattagggagaccgggacggaatatactaattgctgtttgcatatttgtactgacactattttgcggaattgcaacatttctagattcagcaatagagagcttttacaaatcttttgcagatatggcgggatgttgtgttcttgttgaattagacgatttttctactttagatgattggaaagatattttagaatatgcagataataataaaaatgttgtaggatataataatgcatttacaagtgatattatatgtgaagcagtagattttgaaaatgtaccatatacagaaaaacaaagcgattttgaaaaaaataaaatatatgtcagtggaaatataaatacttcttacaatgaatatttcagtagtggtatttttaaaatttcaaaaggaaaatatccgatgtcaggtgataaaggggcaatgatatcagataagctcgcttctgaaaataacctgtcaattggcagtaatgtatctatacagtatgaaaataatacaatcagtattaaggtaattgggatttatactgtaataaatactccaaagacacaggtgagcgatggctactataaagaagtagctaacagtatagtattcactgattataattcgtatgttgaattaaacaatgaagcaagctgttatgggatgaattttttcagcaaagactataaaagtacatcacttttatatgatgatatgagtaaaatgtttcaaaatgttccgaattcggcagttgtaaatcaggttctgaatgaagaactgcaaatgacagatgtaatatcaatgttaaaaagtatgacaagtgtgacattgagcgttatgtatattgtatgtgttgtggttatgtcgttactgactgttttatggcttaaagggcactcaaaaatgattgcaatatacaatacacttggacagaggaaatttaggacaattcaaattctgttatacgaggttttgatgataactgttccggcacttgtgggtgcaggaatattgacattgggactgcttaatagattttctgtcaatatttttaaatactttgttgaattttgtgagatttcaaattttcaaaaaagcttttcacttgatatatggaactttgaaatgaatatctggcaatttgtgtatagaatcgggcttttggaaattagcgttattttaataactatgattggaagctgcatttatgctaataagggtttgcgcacattaaggaataattaggagcggttatgtggtataatctttttgatgtaataaacatgtataatatgataggagcatataatggacaaaattcttgttgttgaggatgataaaacagtgtacagtggcataaaaaagcttctcgaattgcagcattatagtgtggtaattgcacaaaacggtatggaggctttggaaaaaatagatgaatcgttcagccttgtaataatggatataatgatgccgcagttggacggcattgaaacttgcaggaggatgcgtgaaagatacagcgttccgatattgtttttatcagcaaaatcggaagagctggataagctggaagggcttgaagtgggcggtgacgattacatgactaagccattttcgaacatggagcttatttcaaaggttaaagctcttatcagacgatatcgggtatatgacagtggaaatgcaaatcgcacaaacaaggatgattctatagagacagatggacttaaactgtttacgaatcgaaacaaggttgagtttaatgataatgagataaaattaacaggaaaagaatatgagatattaaaattgctgatgaaaaatcctgacaggatatatacgattgagatgatatacgagatggtgtgggatgaggtttttacatataatgcaaagaatactgttatggtacatattaaaaatctaaggaataagcttataaaagcgtgtggtgatgcatgcatacacacagaatggggaagaggataccgttttgagagatgatttaaagagggtaaagaaaaagctgtctttgacatttgcaattgcgattatagggacatgtgccgtttttggactattatactatctgggaattgatttgttgagctattatattgaagctggatcttgtatgatatactataatgaaaagccatatatagacgagtttcaacaatatgtatctgataatgatataagtactacagatgtcgagcaatatgatgaatggatggcggagcatgatgttgcgtattatagtgttcaggaaatggggaaggtaatatacaataaatcaaatgtagataagattatatctccggctaaaaatatgtatgattaccgatatacaggaagctatcagctgcctgtccagttcgccgatatagaagcggaagtatttatatatacaggatttacggaaaaatattatatagctttaatgatttttgatgtgggattatctcttatgctgggaatcgtatttgtgtatttacgcatcagaaaaattatagcgggctatcaaacagagcttgaagagactcaatcacaggagaaaaaagcgcgacaggaaaaggatgacctgatgcgtaatatggctcatgacctgcgtacgccgttgaccggtgttatgacatatgttgatgtaatgaaactggagaatgaagcatatgccgagaatatgaaaaatcttaattttataagtgaaaaggtgttggatatcaggtctcaggtagacaatctgctggatttttcaattgccggttcacaaagacctgttgaattggatgcatcaatggatgttgagtatatatttggagattacctctcagatgtgtgtgctcagcttatgaaaagcaattatgaggttgatgcagaaggaataagctttaagcaggtaaaggttgctgttaatatggcatttttgaccagaatattttccaatctgacggataatatatataaatatgcggacaataaaaagcctgttgttatgaaaacagcttttacgaaaaaaacatttagcgttgaaattggcaatggtgtatgtgacaataaaacacttcttaaaagtgccgggatagggcttaagagcgtggatgcgatgatgcagcgcatgaatggaagtatgagctttaaaagggaacatgggaagttttgggtgaagcttgagtttccgattgtgtagtgaatattttttcatgaaaacctccatactaaatagaaaagaagtatggaggtttttatgagcagaaatattgaaaatcatgattcggtgctcttgcttcaggattgcatagcgggctgtaagatggcacttgagagcatggacgatataagagaacacacagatgacaagcagcttcgtgagctgatagacaagtactatgatgagcacaccgggctgtcagtggattgcagggatatgcttgacaaagcaggtgcagatattaaggaaccgggtgtgtttgcaaagatggctgcgaagctgcagactgcaatgaagatggcagtgaatgatgatcagtcccaggcagcaaagttactgacggagggctgtaatatgggcatagagacaatcagcggcagtctcaatgaatatcgcgatgctgattcaaagagtgtggcaattgcagagaggctcaggacgcttgaggaaaaaatggtgggagatctgcagccactattataaaaaatataaaataacggctgttgtactgatttggtacaacagccgtttatgcgtagctgtcaagcatcatgcctgaataaattgacgaaatatatggtgtgttgaaattgtgtccgggattcttatatgccacaacaaccttctgcacatagttcatagggttgactgtcacagattttgctttgtcacctattgcatcctttagtgctgtaagagtgttgaaggtgtcatcagctctgtccggactaagcgcaccggcgaggatatcgcggtcaatagtgagcttgccgtcatcgtctgtcatgagaccgatgtaggaaagctttgactgtgagccctttgtgatggagcttatatcacgaagcagccttgtggcatctgcagagtcgttcactgaataatcatctgccacgtctatcatcttattgtatgcgtcaaccagagtctgcacattgtcggcaactgcatcggaattggccttaaaaccgatggctgcggcacctgtatctgtggtcggctttttgagcgtgagctcaaaggtattattgatggtaaaggtgttggacaaggatgagtgcgcggtgccattcagcgaaaagtcagagttgtgggcaggggatgataccttatcaatacccagctgcttcatcatgcttatggactctgcgttagctgacggagccacactaaagagagaatcctcagtctcgctgagacctgtctgcattgatgtaagctgaagcgctgccttgcctgagtcatcatggactatgtcagcctcaatgccaagaccggatgcgtttatgagcctcttgagcttgtcctgcacctcgccgtttgtttcaccggtgctcactccgaactggaactcataggatgatgcattggtatttatgtcaaaggaatagctgcctggtataaaggacagggccttgctgtctaagtagctgccggtattgatctgtggtgcggcgagctgtctgacctctatgtcaaagccgtctgctcctttattctctgagccgtcacccacgtagcgcacgcctacagcatcctcattagatgactccgcaaccttcttctggaaggagtcagaggagcctgcgtatttatcagaaagcgaatccacggcatttaagatggccttagagctttcctttatatcgatagcatatttcttggcctcggacatattggaaatcttgtacagaggggactctttatttgtctttattattctgttgtatatcttgcgcagatcgcttttcttgtgcgaatcatagcgcgatacctctttattggcataagtgctggcatagtaagcgtaggcactgtctatctttgccataaagacccctcctttcatccgtgaaaatcgtttaatccgttaaatggtaatcctttaaatattatattgtatagctgcgattactaatgcttaactgcaactataataagctatgtaaaatttttaattatcaaatcgtacttatacacatatattatatcgtcataattgaggatttacaacaacaaaatacttgaaaaattcagataaatgtactatatttagttatgtatctgtaagatttataaaaattaattgctgccggacacaaaaaaagtgcagacagcggcactgttcaaaagaatttacaataaattttaaaatagctattgacggttacggctcaactgtgatatagtatacaggcttggaaataggtcttttttttatgcctttttttaagggtacaaacaacaaagaatttaaacggaggtggaagtcgtgcgtacaaagattacattagcgtgcacagaatgtcagcgtcgtaattacaacatgacaaaggacaaaaaaactcatccggacagaatggaaaccaagaagtattgtagattctgcagaactcatacaatgcacaaggaaacaaaatagtctaggaactgagtgaaggagtacattatgggacagaatgaaaaagtcgaaaaggctccaaaaacaagctggttttcaggtctgaaagctgaatttcagaagattatctggcctgagaagcaatcggtcatcagacagaccattgcagtactggcggtttcagtagttaccggtcttattattgcgcttcttgactggggtatccagcagggcgtagatttccttattggtttacatttttaaaacggaggcaaagtgattatgacagaagcgaactggtatgtagttcatacctattcaggttatgaaaacaaagtcaaagctaatattgacaaaacaatcgaaaacagacatcttgaggaccagatccttgaagtacgtgttccattggaggacgtcacagaggtgaagaacggtgttcgtaaacaggtttccaagaagatgtttccaggctatgttcttattcatatgattatgaatgatgatacatggtacgttgtacgaaataccagaggcgtaactggatttgtaggtccgggaagcaaaccggttcctctcacagaagccgagatgagacctttgggtattaagacggaaaacgtggtagttgattttgctgagggtgacatgatagtcgttatcggcggtgtctggaaggatacagtcggtgttatcacagctatgaattatcacaagcagacagttacaattaatgtagagctgttcggtcgcgagacaccggtagaagtaagtttcgcagatgttaagaaaacaaattaaggaggcaattccaaatggcaaagaaagtagaaggatacattaaattgcagatccctgctggaaaggcaactccagctcctccagttggacctgcacttggacagcacggtgtaaacatcgtagagttcacaaagcagtttaatgcaaagacagccgatcagggcgacttaattatccctgtagttattactgtatatgcagacagaagtttcagtttcattactaagactccacctgctccggtattaatcaagaaagcttgcaagattcagtctggttcaggcgagccaaacaagaagaaggttgctaagatcacaaaggcacaggttcaggaaatcgctgagcttaagatgcctgacttaaacgcagcttcacttgagtctgcaatgagcatgatcgctggtacagcaagatcaatgggtgttgaagtggttgactaacacttagcgaaaccaacatacccctaaagaagttacaaatttatgtaacctaaaataataacaaagaaacgtaaatgtgggagggccctctcccgatattaccaccaggaggttattttttcatgaaaagaggaaagaagtatcaagacgctgttaaggcatttgataagaaagagcagtacgatgttgctgacgctatctctatcgtaaagaaaaatgctacagctaaatttgacgagacaatcgaacttcatcttagaacaggctgcgacggacgtcacgcagagcagcagatccgtggtgcggttgtattaccacacggaacaggaaaaacagttaaggttttagttttcgctaagggaactaaggttgacgaggcgcaggcagcaggagctgacttcgttggaggcgaggagttaattccaaagatccagaacgagggatggttagacttcgacgttgtagttgctacacctgatatgatgggtgttgttggtcgtttaggacgtgtccttggaccaaagggcttaatgccaaacccaaaggcaggaacagttactatggatgtaacaaaagctgttaacgatatcaaagccggtaagattgagtacagattggacaagacaaacattatccatgtgccagttggaaaagcatctttcacagacgagcagttaaacgacaacttccagtctcttatgggtgcaattaataaagcaaaacctgctagcttaaagggtcagtacattaagagcgcaactcttacatctacaatgggacctggcgttaagttaaacgtggttaagattacacagtaagatagttaaacagttacagtaaaacaatttacaagacctatcaaacgccaagcaaaagttttgcggaaagtaattgacatccgtaatatagtttgatataattgcaatgcatattgccgaagacagtaggtgccgcaaggcgtaaacgtagaacctaccgagggaattttcgagatttatcttgaattttgacttgtacccttctgtcgacaggcaggagggtttctttgattaataaatcaaatacctcatgtcttttatgcgaaaatctaaaaggaggtaaatgaatcgtggcaaaggtagaacttaaacagccaatcgtagatgagatttccggtgttatcaatggtgcacagtcagtagtagttgttgattacttaggactcacagtagcagaggatactcagttacgtaaacagttaagagaagccggtgtgacttacaaggtatacaagaatactttagtaaaccgtgcaatccagggaacagagttcgagggattaaaggatgtccttgaaggaccaagcgcattcgctgtatcagcagaggatgcaacagcaccagccagaatcttagctaagttcgctaaaacagctccggctttagagattaaagcaggtgtagttgagggaacattttatgatgctgagggtatgaaggcaatctccgctgtacctagcagagatgagcttcttggaaaattacttggaagcattcagtcacctatcacaaatcttgctcgtgtactcaatcagatcgcagagcagggtggcgctgcagatgcagccgtagaggcagcaccagcagaggatgctgcagaggaagctccagcagcagaataattcaaatattatatttgaaccttattatcataattaaatttttaaatggaggaaattataatggcaaagttaacaacagcagagtttattgatgctatcaaagagttaagcgtattagagttaaatgatttagtaaaagcttgtgaagaagagttcggtgtttctgcagcagcaggtgttgtagttgcagcagcaggagctgacggagcagcagctgaggagaagactgagttcgacgtagagcttacagaggttggaccaaacaaggttaaggttatcaaggttgttcgtgagatcacaggtcttggacttaaagaggctaaggacgctgttgatggcgcaccaaaggttatcaaagagcagcttgacaaggcttcagcagaggacgctaaggctaaacttgaggcagagggtgctaaggttacacttaagtagtctgataggttacgagctaattaaaaatataaaaagagtcgaggacaaattttatttgcgcctcggctctttttatgtttttattgcgcgacagtcggagcgcgtcccgaaaatgcctgagcatttttggaacctccgctcgtagcctatccgacggcgatgaaaattattgcgcgacagtgaaaaaaataaaaaaacacttgcattcgtgccggatttgttgtatagtatacgttgcactattgtggtgcagtggcatttttatgcaattttttaaatgatgcaaatttgtcaataggtaaattacactaaaatgcattcgcaaatatgtgcacaagagaaaaaccacaagatatagtaactggggtggtttttgaatcattatctagatacttgctagattaaaataaaaacgagaggtgaaacgtcaatggagaaaaacagaatacgtccggtcacatccggaaaaagcatgcgtatgagttactcaagacaaaaagaggttctgcagatgccaaatctgattgaggtccagaaggattcttatcagtggttcttagacgaaggtctcaaggaagcttttgcggatatctctccaatcacagattacagcggaaagcttagtcttgattttgtagattttacattatgcgaagatgatgtaaagtatacaattcctgagtgcaaggaaagagatgcaacatacgcagctcctttaaaggttaaagtcagacttcacaacaaagagacagatgagattaatgagcatgaaattttcatgggtgatctgcctttaatgacagagaccggtacattcgtaatcaacggtgcagagcgagttattgtcagtcagttagttcgttctcctggtatttattacggaattgctcatgataagctcggaaagaccctgtattcttgtactgttattccaaaccgtggtgcatggcttgagtatgagacagactctaacgacgttttttatgtaagagtagatagaacacgtaaggtacctatcacagtacttttacgtgcacttggagtaggtacaaaccaggctattctcgatatgttcggagatgagccaaagatccaggcatcattcagcaaggaccctgcaatcacagagcgtgagccacagggaagctatgaggctggtttattagagttatataagaagattcgtccgggcgagccactttcagttgagagtgcagagagccttattacagcaatgttcttcgatcctagaagatatgaccttgccaaggtaggacgttataagtttaataagaagcttgctttaaagaaccgtatcagtggacaggttttagctgaggacgtagttgatccttctacaggtgaggttatcgctgaggcaggtactgttgttgaccgtgcgcttgctacacagatccagaacgctgccgttcctgctttatggattcagacagagacaagaaatgtcaagattctttcttctatgatggttgacatcagaagctggattcctgagcttgaggatcctaagtctatcggtgttaccgagcttgtttactatccggtactcgctcagattctcgaggagtatgattcccttgaggacagaatcgaggctataaagagagatatatctgaccttattccaaagcatattactaaagaggatatcttcgcaactatcaactacaatatgcacttagagtggggcgcaggaacagatgacgatatcgatcatcttggaaacagacgtatccgtgcggttggagagctgttacagaaccagtaccgtatcggtctctcaagactggagcgtgttgttcgtgaaagaatgactacacaggacttagagggaatttcacctcagtcacttatcaatataaagcctgtaactgccgctgttaaagaattctttggttcttcacagctttcacagttcatggatcagaacaaccctctcggagagcttactcacaagagacgtttatcagcacttggacctggtggtctttcaagagaccgtgccggattcgaggttcgagatgtacattacactcactacggccgtatgtgtcctgtagagactcctgagggaccaaacatcggtcttatcaactcacttgcatgctatgcgagaatcaatgagtatggcttcgtagaggctccatatcgtaagattgacaagactgatcctaagaacccggtagtcacagaagaggttgtatacatgacagccgacgaggaggacaactaccacgtagcacaggctaatgagaagcttgatgccgaaggacatttcgtacgtaactcagtttcaggtcgttacagagaggaaactcaggagtacgataagtcagcatttgattatatggatgtgtctccaaagatggtattctcagtagctacagcgctgattccattcttgcagaacgatgaccctacacgtgccctcatgggatcaaacatgcagcgtcaggccgttccgcttctgaccacagaggctcctgtagttggtacaggtattgagacaaaggccgcagttgactcaggtgtctgcgtagttgcaaaggcagacggagaggtattatcttcagagtcaaaccgcattatcataaaagagactgacggaaacaagagagagtatatccttacaaagttctctcgttctaaccagtcaaactgctacaaccagagacctatcgtatttaagggtgacaaggttaaggcaggcgatgttatcgcagacggtccttcaacaagtcagggagagcttgctcttggaaagaacccgcttatcggattcatgacatgggaaggatacaactacgaggatgccgttcttctttcagagcgtctcgtagagtatgatgtgtatacatcagttcatatcgaggaatatgaagtagagtcacgtgatacaaagctcggacctgaggagattacacgtgatgtccctggtgtcggcgatgacgcactcaaggaccttgatgagagaggtatcatccgtgtaggtgctgaggttcgtgccggtgatatccttgtaggaaaggttacaccaaagggtgagacagagcttacagcagaggagagacttcttcgtgccatcttcggtgagaaggcaagagaggttcgtgatacatcacttaaggtgcctcatggtgcttacggtatcattgttgatgccaaggtatttacaagagagaacggcgatgagctttctccgggagtaaatcagtcagtacgtatctacattgcacagaagagaaagatttctgtcggtgataagatggccggacgtcacggtaacaagggtgtcgtttcccgtgtgcttcctgttgaggatatgccattccttccaaacggacgtccactggatatcgtacttaacccactcggtgttccttcacgaatgaacatcggtcaggtccttgagattcacctgagtctcgctgcaaaggcacttggcttcaatatctcaactcctgtatttgacggagcaaacgaggtagatatcgaggatacacttgagcttgcaaatgattacgtaaatcttccgttcgataaggaagagcttgaaaaggatttacaggctgagcatccatactggagcgcagatgctgaaatcttctatgataaatatgttgatacactccgtgaggacgttatggaatacctttcaacaaacagagctcacagaagcttatggaagggcgttccgatttcaaaggatggaaaggtacagcttcgtgatggtagaacaggtgagtgcttcgatggaaagacaactatcggacacatgcattaccttaagttgcatcatcttgttgatgataagatccatgcacgttcaacaggtccttactcattagttacacagcagccactcggtggtaaggcacagttcggtggacagcgtttcggagagatggaggtttgggctcttgaggcatatggtgctgcatatacactccaggagatccttacaatgaagtccgatgatgttgttggccgtgtcaagacctacgaggctatcatcaagggtgagaatatccctgagcctggtattccagagtcattcaaggtacttctcaaagagcttcaggcacttggtctggatgtcaaggtacttgatgagaacagagaagaggttgaacttatcgagacaagtgagtacggtaatacagatatcaactcaattatcggaaatgataaggactatgcattcgaggacagtgagtcattcgcagagcatggtttctcaaagaaggaatttgatgacaacgaagagcttgttgacatagaagaggaagagtctcctgagacagcggatgacgatatttttgctgatgaagttcttgatgacgaagaataattagaagggagtgccaaaatgccagaaacaaataatatagaaaataatcaggcaatgcagtttgatgcgattcagattggattagcatctcctgaaaagatcagagagtggtcacatggcgaggttaaaaagcctgagactattaactatagaacattaaagcctgaaaaagacggtcttttctgcgagaagattttcggaccaacgaaggactgggagtgtcattgtggtaaatacaagaagatacgttataagggtgttgtctgcgaccgatgtggcgtagaaatcacaaagtcaagcgttcgtagagagcgtatgggacacatcgagcttgctgctcctgtatctcatatctggtatttcaagggtatcccatcacgtatgggactcatccttgacttatctccacgtgtacttgagagagtactgtactttgcttcatatattgtgcttgacccgggcgagacaaagcttgcatacaagcagattctcaatgagtcagagtaccaggaggcatgcgatacttatggccgctcagcattccgtgtaggaatgggtgctgagtctatccatgagcttttagcagcaatcgatcttgagaaggattcggcagagcttaaggctgagcttgagaacgctacaggccagaagcgtgcacgtatcatcaagagacttgaggttgtagaggctttccgtgagtcaggaaataagcctgagtggatgattatgacagttattcctgttattccaccggatcttcgtccaatggttcagctcgatggaggacgtttcgcaacaagtgatcttaacgacctttacagacgaatcatcaaccgtaacaaccgtcttagaagacttcttgatcttggagcaccggatatcatcgttcgtaacgagaaacgtatgcttcaggaggctgtcgatgcacttatcgacaacggccgtcgtggacgtcctgttacaggtcccggaaacagagctcttaagtctctttcagacatgctcaagggaaagggaggacgtttccgtcagaaccttctcggaaagcgagttgactactcaggacgttcagttatctgtgtagagccaaagcttaagatttatcagtgtggtcttccaaaggagatggctatcgagcttttcaagccattcgttatgaaggagcttgccgctaacggaaccgcacacaacataaagagtgcaaagaagatggttgagagacttcagccggaggtatgggatgtccttgaggacgtcatcaaagagcatccggttatgcttaaccgagctcctacactccacagacttggaatccaggccttcgagccaatccttgtagagggtaaggcaatcaagcttcatccactcgtatgtacagcgttcaacgccgacttcgatggagaccagatggctgtacatcttccactgactgctgaggcacaggctgagtgcagattcatgcttctgtcacctaacaacctgcttaagccttctgatggtggacttgtagccgttccttcacaggatatgatccttggagtttactacctcacaatgagaaagctcgctgattacaaggatgatccaaagatggttgcacaggtgtcatcagacactgtatacaatgatgttgatgagcttagaaagctcacaactcctgatgaaaatacaggaaaggctgagcttggcttatatgacctcatctggtttgaggatgtcacagacggaaaccgtcgtgtgctttgcagaccgatagatcttctcggccgttactatggaagtgttaatcttgcaatgctcgcttacgagaacaaggagattactcttcaccagaatatctttgtacaccgtacagtaaagcttcctgacggcacagaggtttcaggttttacagagacaacagtaggacttttgatattcaatgagaacattccacaggatcttggttttatagacagatcaaaggctgagaatgcactcaagtttgaggttgagttccacgttggtaagaaacagatcaagcagatccttgagaaggttatcaacacacacggagctacaacaacagcagaggttcttgacaatgtcaaagctatgggatacaagtattcaacccaggctgccatgacagtttcaatttcagatatgacagtgccaccacagaagccacagatgatcgctgatgcacaggacactgtagataagattacaagacagtacaagcgtggacttatcactgatgaggagcgttacaaagaggttatcgagacatggaaggatacagatgatgcccttacaaaggcacttcttacaggtcttgataagtacaacaacatcttcatgatggcagattccggagcccgtggatctgataagcagatcaaacagcttgcaggtatgcgaggactcatggctgatacaacaggtcgtacaatcgagcttcctatcaagtcatgcttccgtgagggtcttgacgtactcgagtacttcatgtcagcacatggagctcgtaagggactttcagatacagcgcttcgtacagctgattcaggataccttacaagacgtctcgtagatgtttcacagcatatgatcgttcgtgagacagactgctgtgcaggcacaggacgtgagattccgggaatggttgtaaaggcattcatggagggtcgagaggaaatcgagagccttcaggagagaattacaggtcgtttctcttgcaatacaatctgcgataaggatggcaatgtaatcgttaaggccaaccatatgattacaccaaagcgtgcagcaaaggttatggcagagggtgttgacgagaatggtaatccaatcacacaggttaagatccgtacagtgcttacctgtcgttcacacatgggagtatgtgctaagtgttacggttcaaaccttgcaacaggtcaggcagtacaggttggtgaagcaatcggtatcatcgcagcacagtcaatcggtgagcctggtacacagcttaccatgagaacattccatacaggtggtgttgccggtggagatatcacacagggtcttcctcgagtagaggagattttcgaggcacgtaagcctaagggactcgctattatcacagagttcggcggaactgccacaatcaaggatacaaagaagaaacgtgaggttatcgttacaaacaacgagacaggcgagacaaaggcttacctcattccttacggctcacgtatcaaggttgtagacggacaggagcttgaggccggcgacgagcttacagagggttctgtaaatccacacgatatcctcaagattaagggcgttcgtgcggttcaggattacatgctccgcgaggtacagcgtgtttaccgtttacagggtgttgagattaacgataagcatgtcgaggttatagttcgtcagtgcttacagaagatccgcgtagaggagccgggagattcagatttacttccgggcagcatggttgatgcccttgacttcttagagctcaacgagaagcttgaggaagagggtaaggagcttgcagttggctcacaggtattacttggaatcacaaaggcatctcttgcaaccaactcattcctgtcagcagcctcattccaggagaccacaaaggttcttactgaggcagcaatcaagggcaaggttgatccgcttatcggtatgaaggagaacgtaatcatcggtaagctcatcccggcaggaacaggtatgaagatttatcgtaatatcaagcttgacagcgatgtaaacgatgaggatacacttgattttgatgatgatgattttgcggatttcgcagaggaagaggcagtcggagtcattgatacagatgctgaatcagttgatgaagaataattactgatgtttgtacttaagctacagaagctgttacaaaccaaaaagaaagaagtccgggaaaccggacttctttcttgtattatattgaaaacaaaattggtcttgacaaaacagacaaggatttgtataatattatagcgtgcataagattgcactgcttaaaataaaacaggaggtgaaaataatgccaacatttaaccagttagtaagaaaaggacgtcagacatctgtaaagaagtctacagcaccagctcttcagagaagctttaactctcttcagaagaagccaatcaacacttcttctccacagaagcgtggtgtatgtacagctgttaagacagctactcctaagaagcctaactcagctcttagaaagatcgccagagttcgtctttcaaacggaatcgaagtaacttcatacattcctggtgagggacacaacttacaggagcatagcgttgttctgattcgtggtggccgtgttaaggatttaccaggtacacgttaccatatcatccgtggtacattagatactgcaggtgttgcaaacagaaaacaggcccgctctaagtacggcgcaaagagaccaaaagctgctaaataatttagcaacattgtgtatcacaaacagaactaaagtaggttagtgttgggattagacctgcagatgcaggatttcactttatgaatacaattccgcacgaacacattagagagacacatgtgagtaccgatgaattaatccacaaatatcatgattaaggagggaagtaacgtgccacgtaaaggacatactcagaaaagagacgtattagcagatccaatgtacaacagcaaagtagttacaaagcttgttaacagcattatgttagacggtaagaaaggcgtagctcagaagattgtatacggagcatttgctacagtagaagagaagacaggaagaccagctcttgaagtattcgaagaggctatgaacaatgtaatgccagctctcgaagtaaaagcaagacgtatcggtggtgccacatatcaggtaccaatcgaggttcgccctgatcgtcgtcaggctttaggccttcgttggttaacagcattctcacgtgccagaggagagaaaactcaggctgagagattagctaacgagatcatggatgcagctaacaacacaggcgcatctgttaagagaaaagaagatatgcacaagatggcagaggcaaacaaggcattcgcacattacagattctagttcctgtaagaagcttacagctttgcttttgattcatgcagcaaaccggatttgtaacagagtccggttgtgcataggacactaaatataggaggaaaaaaccttggctggaagagaatatccacttgagagaaccagaaatattggaatcatggctcatatcgatgctggtaaaacaacactgacagagcgtattctttattatactggtattaactataaaatcggtgatactcatgaaggtactgctaccatggactggatggagcaggagcaggaaagaggtattacaattacttctgccgctacaacatgtcactggacacttgaagagttcactaaaccaaagccaggagcacttgagcatcgtatcaatatcatcgatacaccgggccacgttgacttcacagtagaagttgagcgttcactccgtgtacttgatggcgcagttggtgtgttctgtgcaaagggtggtgttgagcctcagtcagagaacgtttggcgtcaggctgacacatacaatgtacctcgtatggcattcatcaataagatggatatcttaggtgcaaacttctacggagctgttgaccagatccgtacaagattaggaaaaaatgctatcgtacttcagttaccaatcggtaaagaggacgatttcaaaggaattatcgaccttttcgagatgaaggcatatatctacaatgatgagaagggtgacgatatcacagttactgatgatcttggagatatggctgatcaggctgcagagtaccgtacagagcttattgagaaaatctgtgagttagatgacgatctcatgatgcagtatcttgagggtgaggagccatctgtagaggatatgaagaaggttcttcgtaaagcaacatgtgagtgtacagcagtacctgtatgttgtggttctgcataccgtaacaagggtgtacagaagttacttgacgctattgttgagtacatgccagctcctacagatatcccttcaatcaagggaacagatcttgagggaaatgagattgagagacattcatcagatgaggagccattctcagcacttgcattcaagatcatggcagatccattcgtaggaaagcttgcattcttccgtgtttactcaggaaaatgtaaggcaggttcttatgtattaaatgcaacaaaggataagaaagagcgtatcggacgtattcttcagatgcatgcaaataagagacaggaattggatgaggtttactcaggtgatatcgctgctgctgttggatttaaattcacaacaacaggtgatacaatctgtgatgagcagcatccggttatccttgagtctatggagttcccagagccagttatcgagctcgctatcgagccaaagacaaaagctggacagggtaagttaggtgaggctcttgcaaagcttgcagaggaggatcctacattccgtgctcatactgatcaggaaacaggtcagacaatcatcgctggtatgggtgagcttcaccttgagatcatcgttgaccgtcttctccgtgagttcaaggttgaggcaaacgttggtgcacctcaggttgcttacaaggagacatttacaaaggctgttgatcaggaatacaaatatgctaagcagtcaggtggacgtggacagtacggacactgtaaggtacgtttcgagccaatggatgccaatggagaagaacttttcaagttcgattcagaggttgtcggtggtgctattcctaaggaatacattccatcaattggcgaaggtatcgaggaggctacaaaggccggctctcttggtggattcccagtagttggtatccatgcaacagtatacgatggatcttaccatgaggtcgattcatcagagatggcattccacattgccggatctatgtgtttcaaagaggctatggcaaaggctgcacctgtattacttgagcctatcatgaaggtagaggttacaatgcctgaggagtacatgggagacgttatcggtgatgttaactctcgtcgtggacgtatcgagggtatggacgatctcggcggtggaaagattgtacatgcatatgtaccacttgcagagatgttcggttactctacagaccttcgttctaagacacagggacgtggaaactactcaatgttcttcgacagatatgagccggttccaaagaatgtacaggacaaggtgcttgctaaccacgcaaaataattgcaaattagcaaacaatttatagtacaaatgatgaaatatatactatatatggtataaaaatcaaaaataaaggcatttccccttgaaaaagggggatttgccgtaaaatttacttgaaaaaactttgattatttcgtataatcaaagcagtcggtagattataaaaatagcccatggggcataaaagtttaaggaggacgtttcaaaatggcaaaggctaaatttgaaagaacaaaaccacattgtaatattggtaccatcggtcacgtagatcatggtaaaacaactttaacagcagctattacagcagtattagcagctcgtgtcgctggtaacacagctacagatttcgctaacattgataaggctccagaggagagagagcgtggaatcacaatttctacagctcacgttgagtatgagacagaaaagagacattacgcacacgttgactgtcctggacatgctgactacgtaaagaacatgatcactggtgcagctcagatggatggtgctatcctcgttgttgctgctactgatggtgttatggctcagacaaaggagcacatcctcctttctcgtcaggtaggtgttccttacatcatcgtattccttaacaagtgtgatatggttgacgacccagagcttatcgagctcgtagagatggaagttacagagcagcttgaggagtacggattcaatgattgcccaatcatccagggatcagctcttaaggctcttgaggatccaatgggaccttggggagacaagatcatggagcttatggatactgttgattcttatatcccagatccacagcgtgatacagataagccattccttatgccagtagaggacgtattcacaatcacaggtcgtggtactgttgcaactggtagagtagagcgtggtacacttcacctcaacgacgagttagagatccttggtgttaaagaggacgttcagaagactgttgttactggaatcgagatgttccgtaagcagttagacgaggctcaggctggtgataacatcggagcacttctccgtggtattaaccgtgaccagatcgttcgtggacaggttcttgctaagcctggtacagtaacatgtcaccgtaagttcacagctcaggtttacgttcttacaaaggacgagggtggacgtcatactccattcttcaacaactatcgtccacagttctacttcagaacaacagacgtaacaggtgtttgcgagcttccagcaggaacagagatgtgcatgcctggtgataacgtagagatgacaatcgagctcatccatccagtagctatggagcagggtcttacattcgctatccgtgagggtggacgtacagtaggatctggacgtgttgctacagttatcgagtaatacaatcttaatatggatttgttatcgtaagataacgttgtgtctaaacgtaagatacccgtagaacttcggttctacgggtttttctgtatcttaaagagagaatgatttgaaaaattataagtagagaaatagcgaaatatttatcagcaagataaaatacagataaatttaaaattgaaaaataagaccagtggtgccaaaacggtgcccaaaaagaaactcctgcgaatgtttgccattcacaggagtgattttttaccaacctttaatctgcttgatctgttcagcacgtttcggatctcgatgatattgcagtttcagacggattgtttctacaacttcctgtctggcttcatcatcaagctgatagaatgatgtaagtagattatctacatcaggcatactatttttgccaaaaagatacatcaacggatacatagaattttttaagtaagtctttacacgacttgcgtctaaggctccgttcaaaccgtctggaagtgtaggataaatctcttcttccttaattgtgtcagaaaatggactggcagaacatatctcattcacatcaatttgcaattcgtttgcaagtcttaaagcaaaatcaaatcgaatattggaatctttttgaatgattgaatataaggttgtagcactgattccagttgcttttgcaattttacggacatttataagtggttaagagatctgatgtatgcgtagaaaatgggaaatatgttacaaataaaacgagaatttgaactcgaaatttgggaaaaataatgaaaataacttgacatttgaaaataagagatgtattcttaagataaattcaataaacgggagttggataaaaatgtttaatcttgaagaattgagcttggagtttgtagagatttctgaattaaaaacctctaagaacttatttggaccagttatgtacggaacaggtgtgagaatgtagtttgtagaaaagacttgctctatgtaaaaagaaatatagagtaggtcttttttatttaaaaaggattataggagagaatatatgaataaattaactacagctgtatgggaaataacaatgggttgtaatatgcgttgtaaacattgcggttcaagttgtgcagaagcgctacccgatgagttgaatacatcagaagctcttgaggtgtgtgaccaattaaaagatttgggattaaaagttattacattatctggaggggaacctacgacacgtagtgactggcatattattgcgaaaagattagtagataatggcataataacaagtattattacaaatggttggttgattgatgaaaactttgttcataatgcgataacatcaggaattagaagtgtctgtttaagtattgatggtcttgaaaaaactcacgattttatacggagatcgggatcattcaataaaagtattaaagcattgaaagaattaagaaaaaataatatttcgacatcagtaataacttcaataaataaagaaaatatatgtgaattggaagaactatatcaattattaagtgatttgggagttaatagttggcagttacagattgcattaccaatggggaattttgcaaaacgcccagaatggcttatagaacctcaagatattctttctattattgattttgcatataataaaattggaggtaagttgttaattgttttggcagattgcataggttattatagcaataaagatataaaagtaaatgagaattttcttaatgataattggtcttggacaggttgtggagcaggaaagcatgtaattggtattctgcataatggagatattgttgcttgtacttctattagagataaaacattagtagcgggaaatattcgtgaaaaatctttaaagtcgatttgggaaagtccggactcttttaagtggaatagaaattttgatagtagtaagttaaaaggattttgcagagaatgtcgttatacagaacgatgcttaggaggatgtagtaatagtcgttattgcattaacggctcatttgaaagtgaaaatagatactgtgcatataatgttgaaatgaaaaaatggaaaaaatatttggaatcacttaatgatatatcagaaattgataatgttatagaaaaagcagcggctttaaaacatcaggatctttataagatagcttgcgaaattaaacaatctaaattatgattagagaggtaacaaatatgaataaacatgagttatatcataaccacaattatgtttatctgctgacttctaatattattaaccgctgtggtgattcattagatacaatactttttacatggttggtatatttacttacaaatagtgcagggtggtctgcgattatttttggtattaatcaagctacttctgtaattattcaaccatttataggtccattagtcgagaatatgaataaaaagaaagtgttagtactttcagatatagctcgagttctgttagttttgtatatattatatgtatatacacaaaacatgctttcaccattaatattggtttttatgacaatatccatttcattaatagaagcatttcatatgccagcaggggtagcagttattcagcatgtacttcctaatgaacattatgataaaggtgtaagtgtcaatgtgtcttgtaccaaaatagcagtattagttggaactggcttgtcaggcatagtgattagttcatttggaataggtatttctttagcgatagatgctttgatatttttaatatcagcgttgcttatagtaaaaatagaattttctgttcaagaagaaaagaagacaaaccgaataattggcagagaatatttaatttcgcttagagatggatttagttatgtatttgaccataagaagctattaaaactatgttttttatgtattctaattaattcagcagtggttccatttgatgcactgctcgccccgattgcaagagaaatgtttagtggagatgccaaaattgtttcattactaagtgtaagcgtaactattggtactattttgggatcattgacttttgcaaaaatgaaggaggagaaaaaaaataatacacttgttacattttgtggaattgttttaggtgtatactatgtttttattgcatttgtttcaaaatatattgcaaatcctataactcaaaaattactgttgctaatcggttcgataataattggtgcagcattgggattaatgattacttatgtacaagtgaaatttgtaaaagaagttactaaagaatatataggacgtgtttctgcaattcgattttcacttacatacgcatgcgcgccagtggtatcttttgtgattagtattatatacaaagttactgttgttgatacaagttcactttttgtgggatttggtattgtaataataattctttttcttttggcaaataagattacgttttctcctttgaagaaaggcgataaaagttattagaaattatttatatgaaaaactggctgctttttggctataaattaaagctgatagagaagagtataaacagcagaagagaagctttttgactgaggcttccggtgccaaaacggtgccaagaaatcaggcaaataaaaataaatagtacaaatcagtcgtttttcactgtattttggagagaaaaccataaaaaatatgaggtaaaatgatattaaagtatcgtgagggtggacgtacagtaggatctggacgtgttgctacagttatcgagtaattacttgttagtagtgtaaatatctagtaaattcaagggtttccgagatttctcggaaacccttttttacagtttaaaagtatgttatagtaggattaattgatgtagtggtgccaagtcataatgtagatggaaaaggatttttatgatgaaaatagaaacagagcgattatacatccgccattttgtgaatgaagatgcttcaatatgcttcgagggatgggggacagatgagcatttgggtgattttataatgggatatccaatgaatatggatcagatgaattcttttgtaaatgctatggtgaaaaatacgaatgcatgggtaattgttgaaaaagaaagtggtgcatgtataggatatatatcttttgatataccatatcaagaattaaggattggtgaaattggttatgttattggtgaaaagtggcatggtaaaggttatggcactgaagctgtaaaaaagatgatttcagaatacttggcaaaagatagactgtatctcattgaggcaaaatgtaatatagataataaaccttcgcttaatctgcttgaaaaggtaggttttattaaggatggggttttaagaaaaagaagaattgataaaaacacaggggaatatagggatttggttgtttattcaattactacaaatgataaataagcaacatgtttatcgggaggagagtgtacgctaatgaaaaatgaatttttagaagcattaggaagcaataatgcgaataataacacagatttatcattgtatagtagatttgttggaaattggtcgtttacaatgactacatatgatgaagaggggaagattgaagatacaaaagaaggtgagtggcttttttcatatgtcatggatgggtatggaattcaagatgtcttcatttgtcccaaaagaggagaatggacagaggaagatactttatacggagattatggaacaacaatacgagttccaatgatagataattcaaaaaagtggaatatagtgtacgtttccaaatggagtgttgataggttaatcgccgaagaattggagaatgatattatacaaacagggattaataaagatgcgaatgatacaactatatggcaatggaatttcaaaaatattgagaaggatacatttagttgggaaagtatctattcaaaagattgcggaaagacgtggaaatatgcaacaaaggtagaagctaaaagagaaatgtaaattaaatgatttgaataataaatgtattctaaactgtacctaatatgttttctgccacaaaaggtgcaaaatggggtaggaaatgaagtgatggggtagaatatgtaattgacatagcggtctgaatggcatattattcatacaaaggtctccattcaccttatggttttgaactatagaagagatgaacattaaagaaattattatgttatagtttggactggtcgaaagacctgaaaaactcaggaggcacacaatggttaaacacattattttatggacactcaaggatgagtacacagaggcacagaagaaggaaatacgtgccggcataaagaaagggttagagggacttaaagggcagattccgggaatgatcgacatttcagtgcgcacagattatcttccgacatctaccgtagatgtgatgcttgatactacatttgaagatgctgatgcacttgcagcatacgcaaagaatcctaagcatgttgcagtggcagataccaaggtgagaccatttactgcaaatagggcatgtatggatttcgaggtgtaataagcgggaaattagtgtatttgactataaatcttttccgaaattaggcgatatgtcaaaaatgacaaatattgtcaaattatcattgaaatagtactatggtaatgatataataatcttactgtatagaacgaaacctaaatgagaaagggagaattacatatgggtgaggaagctaaaagcaaaataatggaaatgccacttcagcagagattgaaatatggctataagaaagtattggatatgctgcttgtatcgggaggcatatcaattgttgcagttttattggtttattttggtgcaaaggctaatatctttggtgccgagtcgggaacagttgctacatttttcctggttataggactggccaatgtaataatagttggaattgtagctacaatgattgcgaaaaaaatcagtgatcaggttattgattctgtgcttgagccgttacagcagattgaggtagtggcaggagagcttgttaatggaaatcttcacagcaatctggagtatcattcagatgatgagattggcaaacttgcacatgaccttagaaagtctatcaggacacttggctcatatattgatgatatcgacctgactatgagacagtttgctgatggcaatttcaacttcaagccacaggtggagtggaaaggcgattttgtaggaattaaggaatcaatcgttgctttcgaggagagcatgtcagatacagtcagtggtattcagagagctgccaatgaggtttcaaacggtgctgggcaggtagctgccagctctagtgaccttgcgcagggcgcaacagaccaggccgctgttgttgaggagcttacagcaacacttgcttctgtagcggatcaggtagctgagaatgctgagcatgcaaaggaaatcagccagaaggttgacggactcggaactgagattatggatagcaacggacagatgcacgagatggttacatccatgaatgaaatcaatgaggcatctcaggaaatcggtaaaatcatcgcaacaatcaatgagattgcatcccagacaaaccttcttgcactcaatgcttctatcgaggcagccagagcaggagaggcaggaaaaggctttgcagttgttgcagaccaggttactgtacttgctgagcagagtgcaaatgctgctaaggagtcagcagctcttattgagtcttcagtcaaggctgttgaaaaaggaatggttattgcaggcaagacagcatcgcagcttgaggaggttgcaggcaattccaagactatcacagatgaggttaatggaatcgcagagacacttgagacacagacagatgctatcaagcagattaataatggtgtagagcagattaatgatgtagttcagactaactcagcttcttcacaggagtgcgcagctgcaagtcaggagatgagcagtgaggcagagagcttaaatgagcttatccgtcatctgagagttgctgagcagtaagtatattatattgaatagaattattgatggtcacaatcaggagtgatttgatggtaaccggatgttactgttaagactgaggtgtgaagcagcaatattaatatccccacgtttatttccatgtatatggcgaaaaacgtggggatatgttattatatgagtatgacattaaaagatagaataccaaaagaattttatagcttattccgcacgaaaaatatggatgcatacatgcagatagttgttgcgttatatgaggagaataacgaggtctatgcatcactgggactgacacgtgaggagtgtcagataatcatagcggataccatatcaaaaacaggcattgtatggcagactgattataatgaagatgagagtgataaagatagtggcagcatggataatcatgatgattataatcctgattccgaaattgatgttatatatgaccaggccactttcgcatacaccctgacaccatcagctatattgggcaggcttataaactggggctggatcaggagtgattttgatgaaaagctcaacacatatgtgattgcatttcctcagtacagccagatgtatgctgagctgtttaaaaagctgcttgtggatgatgacagcagggagcgcgagagcattttggctgtttacagtgcgctttttacatacttttcagatccggaaaaaaataatgatattctgaaaaatgcgttgtatacgtcaaaaaatcttggtcagcttttatcaaatatgcaggatggtatgagggcatattttgatgagctgtcacgtatgaaggattttataggtatacagaaggtgctgattaaggaaattaataacagtgatagcagacgttatgccatccttacaaccacggacagcttttatcgttacaaggaggctgtaaaggagcttataagtaaaatccttaatcagaacgatgataggagggctgagcttgagggaattctttcgcagactacacccggtacgtttgagagaaaacgctatgagtacagcgtggagtactgtgataaggcaagtgagcttgtttataaggtggagcatgagtttgacctgattgagagaaagtacaacaagcttattgagcagaagacgatttttgcaaagagggcgcttgcaaggatacactatatcctgcaggaaggcgcagatgacgaggataatatagtaaagctcattaacctgatagataagagtgataaaacagatgagatacttggggctcttcgaaacagaatgaagttcaccagacagttttacaatgtaacggacgacagttttccgggaagaagagagagaggaagaagtgagtttgttccgtttgttattgacgatgcttcggcaggcgaagatgatatggcagattttgtgccaaagccattgtataccaaaaaggagcttcaaagcttcagagataaaaatatgcgtgatggcatgtttgtgacagatgaacaaactgtagaatccatggaggatctggaaaagcttctgtttttatggcaggaggagaccaatgagcgcatgggtgaggatacggtgagtctggatggagagataacaaagagtgatggtgtaagctactcaaggcttgtaatatccaaatcggactctaaacgagaagcatagaaaagagagcaatgtatgtttgaatatatggagaatgtttcgccaaatgaggcagaaaatattagaaaaactattcaggatctgttgaggcagacctgtattttgcaaatgaagtgtgaccccgttacattgattcaaagagacaatccaaggtatcaggtgtgtcttagaaacagagagtttatctctgattatctggctgtgcttgactgtgagctggttcatgaccagcaggagcatcttttcaggataacgggtgatggtgtcatgctcgagaagatgactcttcttactgcaaggattgtcattataatgaagatgatatacagggataaaatcatgggcgaggggcttaatgcgacaacaacgaatctggcggagattcgtgagtatggcagaaataccaatctgattaccagaaagctcactaatcaggaatggtcagacgctcttttgcttatgaaaacacatcagatgattgaactgccgggggctattgcaaacctggaggacaacacaccaatttatatttatggcacagtaaatatattctgctcagccatggatataaatgagcttgtgcgcatgtacagtgatgaggtggagctgattaagtatgataacgagtcggctgcaacacttgaagctgccggattgaatacagacggcagttctgtaaaccatacccatgaatttgccaagaacagtgaaatggaggagttaccaattgagtcagtctaagaagatatttaccagaatgtgtctaaacaactggggcggaataaatcacaaggttttgcaatttaatgagtatgtcaatttgttcagtggtaagagtggctcgggaaaatcaaccgtcatggatgcgattcaggtaatcctctacggcagcttcagccccaccttcttgaacaaggctgcagatgatgcaaaaaacaggagaagtgttctgagctatttgaggggggagcagaaggatggctccgcaaatcgtggcgactgtgatttttgttcggtcatagcgcttgagatagaggatacaggcagtcatacgtttacatgtataggaatagcctttgaggtacgaaaaaacgattctgagattaagagatttgtgtacttcagtcattcgggcaggatgccggagccttcatatgtgacagcggacggcttttgctattcaaataatgatattaaaaagcttgtaaatactcgctcacagtcagctgacagacgcgccagaggggatgtaaaccgtatttacgcatcgaaggaggcataccttggcacattatatgatgtgattttaggatatattgaccccaatcgttttatcacaatggaaaaaagtgctattgcactcagaatgacaaatggaacaggccagtttatacgtgattatatgtttccaaagagtgactcgggcacgatagagactatcagtgagcagcttgatgcatacagacaaatcagggaaaaaatagaggatatgcgcaagcgtattgagcttctcaaggaaataaaggagtcagggcaggaactggtaaatatccaaagcgatattgtcatggcagagacaatgatcaggtgcatagatatcgaggatatgcgtgcaaggattcaggcagctgaggatgataaaaagcgtatcgaagaagaacagggcaggctttcagaaaaggcagatgatatagccgggcagcaggcagatctgcagcaggagtatatccaggtatgtgcggatttgaaatcgagcgacttaggaagcaaaaaggatcagcttagagagcttgagaagagaagtctcatgcttaccgacaacagccgtcagtggattaaaatcacaaacggactgaaggcttgggatgaggatgaggtcatcacagattatgtgagcaatacagttttaaacctcattgaagagattgtggatggcgatgtcacagaggcaaaatgtcaggagcttcatctaaagcttgagtctataaagaaggatatcgaggatgagctcgaggacaatacttcgcagaaaaatgagataacaaaagaacttaaggagaaaaaacgtctggtcgatgatatgaagaacaatcgcaagtcatacagtgagagcctgcgttcggcaagagctgcgctgcagagagacttaagtgatagatttggcgagcctgtgaaggtacaggtatttgcggatatgtttgacgtacaggacgaggaatggaagaatgccatagaaggacgtatgggcaggctcaagttctcacttatcacagagccgcgttatgcgcatactgctgctgttattttcagggacatgaagcagtttgaggatgttgacctcatcaattccaaggctatcatggacagtgaaccaaaggccatggatggttcgctttatgaggcagtggatacaaaggaaaagtatgtagatgtctgcctgaaaagatatctgggacatattataaagtgccggagtgttgacgagcttgagcaggtacgagatggagttacaccggactgctactcatacagcaactttattttcagacatctgaagaagcgcgattatactacaaatgcctgcatcggaggcagggtatccaaggcaagacttgctgagtatgaggcagatgtggagaggcttgagaaggaccagatacagcttatgggtattatttcaagtctcaaggcacagagagattttgagtgcttaaagggggagccggagtattttgtgggcctttctgaggcgtcagatgagcttaaagcagttaattcgcagaaaaatgagctcgaagagattattaggacgatggagaatgggcagtacaaggagctaaaggagaaaaagaggcttcttgagaaaaacatcgatgcacttaagagtgctttttcactgaatcagcagcagataaatgaaaagataagccagcatgagaaaatcataggtgcaaacgaacagcgaagagcacagctggaagatatgttacagggctatgttgccggagaggagcttgagaagcaggtgcaggatatgctgcagcatagctcaggagcatcggtcaagagcaaacagcgtgagaagcttattgagctgcaaggcgcagacggaaatggcggcaggcagcagtcgtgtgtggagacgttgcagactgcccgctacaggtatataaaggagtttccgtcaggtcagttcagcggagccgagaagtcaaataaggcatatgaggagctgctggaaaagtacgagaaggattatgagccggaatatgagagtgagtttgaggagcagtgcaaggtgatctacaaaagtctcagagagaatgtcatcggtacaatccacggtgatatcaaggctgcaaagcgccatgcctatgagataaacaggcttcttagggagactaatttctcagacagtacctatcagattaagatagagccggcaaagaacgaaaacggtcagttctatgatatgcttatggcggaagaactggacagtaaaaatccggataatggcggaatagcgggacagataagctttggtgaggatgatttttataagaaatacgagcagaaaattaaacttttgacagacaagttcatgccgccaagggatgaggatgagcatctgcgaatgcaaaagcgcaaggaaatggagcagtatgcagattaccgcaattatctgtcattcagcatgtatgagcaggttactgacgaaaacggccgtgtcatcagagagaactttgtagatgacatggcaggacgtgattcgggcggcgagggacagaaccctaagtatgttgcgcttctcgcgggctttgcgatgctttatatgcagcagagcaatcgtgattcaaagattaagctggtgcttttggatgaggcattttccaagatggatcaggagcgaagtgcggtgtgtctcaagtatgcaaggaagatggacttgcagctgattgtctgtgtaccggatgaacgtctgcagtcgcttattagaaatgtggactgtgtctatggcttcaggcggcataataatcagatttctatgatgcatatagacaagggcgattatctgaaattgatggagggatagatatggcatattatatagcagaaggtgccgttgttaagggtcaggtgacaatggctgacggagcaagcgtatggtataatgcaactgtaagaggcgattcagaaccgatagaaataggcagaaattcgaatatacaggacaatgcagtggtacatgtggacttaagccacagtgtcagaatcggtgacaatgtgacaataggacacagcgcaattgttcacgggtgtactataggtgataatacactcatcggcatgggtgccatcgtgctaaatggagcaaggattggtaaaaactgcataataggtgcgggcgctcttgtcacccagggcaccgatattcctgacggaagcctcgcatttggttctccggcaaaggtggtcagggcactgaccgctgaggagatagaggagaatcatcgcaatgccatgcattatgtggagattgcgagggagtcgctgatttaatattgggcggattatttacataaactttgcaaatgggtggtagcggtttttacataaaaaaaataaaatcgtagtctgaggaatacaaaacagggaaggtataatttatgaaatcaaaagaggacaatacacaaaagaaaaccaaaaagctctcatcaaaggagctctcatgggtattatatgatgtgggaaattcagcatacacactgcttgcgtgtgcgctcataccgatatggtacaaaagccttgccgttggagatggtgcagggcagatttcatctgacagggcaaccgcgtattatgcggtggcaatagctgtgatgacagttgtatcagcacttatcgggccagtctgtggtgcgatagcagaccatatgcgcatcaaaaaggctattttttcaacgaccgtagttgttggagtgtcggcatgcatacttaacggttttacacctacatgggtgctgtttcttgttatctatgtgcttacaaagatattttacaatgcatcgctggtgttttatgactcgatgcttgtcgatgtgacgacaaaggatagaatggacgaggtgtcttcctacggctatgcctggggatatctgggctcgtgtgtgccgtttcttgtttcacttgcagcgtacatctgtgggccggatatgcttggatacatatcaaaccgcctatcgatgataataggctttgcggttacaggaatctggtggttagttgttacaattccattgtttaagagctataaacaggtgaattatgtatcggatgcagcagacaaagatattcataagaattttgaaaatgatgcatttataagagaaaatatcaaagagaaaaacaaaacaaacaaaaatccgggagtcctaagacttatagctgacgcatttgcacagatttttggaacaatcaaaaaaatagctacaaaagataaaaaagtaggactgtttttggttgcttttttcctttacatagatggtgtaggtactataatagataattgcataaacataggaactgatttaaagctcgattcagtgggacaggtagtgtttttactttttacacagatagtggcatgcatcggttcacttgtttttggaagactgtcacagacatacaaaactacaacgcttttgtatgtctgcattgcgggatattttgcagtttgtctatatgcacttacactgcatgatctgattggctttggaatcatggcatttggtgtgggatgcttccagggctcattgcaggcgctgtcacgctcatatttttcaaagattattcctcctgagaactcgggagagtatttcggaatctatgatatttttgcaaagggagcttcatttttaggctcgcttgtcatagcgtcagtaaagcttgcaggcggcacgataaatgtggcggttgcaactatggcaatattctttgcagtgggatttgtatttttaaggtttgcagacagatatgatgcaccgaggcatgaaaataactaaaataaaaagtaacgaaagaaggcttaaagcatgataaacacagagggaacaaaggtctgggcacacagaggagcatccggatatgcaccggagaacacacttgaggcattcaagaaggcagaaaagatgaaggctgacggcgtggagcttgatgtgcagctcacaaaggatggagagcttgtggtcatacacgatgagaccgtggacagagtgagtggtgagaaaggctttgtaaaggactatacactaaaggagttaaagcgcctcaatgtgtcaaagcacatgccgtcctatgacaagaagactcgcattccaacactcgatgaggtgtttgacctgctcaaaaacacagagatgaccataaatatcgagcttaaaaacggtatcgtacagtacaaaaatctggagaaaagggtactggcgcttgtggaagagtatgatatgcttgacagaatctggtgctcatcattcaatcacgagtcgattgtgcgcatgaaaaagctttgccctgatatgaggtgcggtctgcttttttctgacattatagtaaatccggcagagtatgcaagcgagcttcatgtggatgcgctccatccggcaacctaccatatgcaggatgaaaactacattgacaaggcgcacggaagaggacttagagctcatgtatggactgtaaacgaaaagcatgagatgaaggcacttgtcaaggcagaagcagatgcaattatcacaaattatccggatattgctgttgaaatagttaaaaatgcctaaaagatatataaaatgcacacaaaattaatttatgtaaagctgagtaaagaaatgtaaagtttttaccatgattttacataactgcgttttggactttacattagcttgatactattaacttgttgaatagttattgattaattttaataatttatcatgctaatggagagattaattatgttgaaaaagaaattaccaaagaaagcggtcgtcataggaatgatggcaacgatgataacaggctgttcacaagaggtacaaactaccaatgtggacggccttaattcatataaaaatgcgtcaaagaggtggtaatgcagcttgctgcaaaggaaacactcagatgtgctgatatcgttgaagaaatgtttgtaaatttgcatgaatgtattgacaaaaaaggcaaaaatatcgaaaatgaacttaagagtgcacggacattgcagaagcattatgtgctgtgcggtatagcgagaattggaatattatcagatgatatcaacggagaggtaaatattgcatagggaaagagttttgaaggcacttgcggggctgcttgtcggggtggaaaaaaagcttcatctggcagacagaaggagacgccgtgaggataaactgatagagcgggcaaggctgcttgaaatacagcgggcacaaaataaaacgaacttaaaagacgcggatgcgaatggaaaaatatcatatagaataggagcatatatgcagatgaaaaaactggaagaagtttacacaaacagggagctgtcatggttacagttcaatgagcgagtattaaatgaggcgggcaatccaagagtaccgcttgcagagagactgacctttgcatcaatttaccagacaaatctggatgagtttttcatggtaagagtaggatcactcatgatgcagatgaattcaaaggaaaagattttcgagaacaagacaaagatgtcgagtgaggagcaggtatcggcaatccttgacagagtatgcgagcttgagaagaaaaaagcaaggatttacgagcagctcatgggtgagcttgagccaaagggcgtgcgcataatcaatttcaacaagctgtcaaaggatgagggtgatttactggaggcatattttgatgcacacattgcacctttcctctcaccaatgattataggaaagcagcagccgttcccattccttgccaataaacagctctatgcggtagtgcttttaaccacgcagaagggaaagaaaaagacaggtatcgtgccatgctcaaacagcgtattcaagcgtctgattgagatacctacaagaccgggcacatttatgctgtcagaggaacttattttacactttgtatcaaagctctatccaaagtatgtaatccgtgagaaatcaatcatgcgtgtgacacgtaatgcggatatcgatgcgcagagcatgtatgatgaggatatggattaccgtaacatgatggaggagctcatcaagaggagagtgcgtcttgatcctgtaagagttgagctttcaagaaaaatcaaccgcaaggcgattgacgaactctcgagcttccttgagattggcaaaaagcattttatcagtgtaaaaacaccgcttgatatgtcattcgtattccagcttcagcactatctgcgagacaagcaggagcttttctttgagaagcgtacaccgcgtgacacacctgagctttcgcttaaggagagtatactcggtcaggttgagaaaaaggatgtgcttctttcatatccgtttgagagcatgaagccgtttatcaagatgcttaacgatgcagcagaggatccagatgtggtttccatcaagatgacactttacagagtggcagacaagagccagattatcgatgcacttatagaggccgcagaaaacggcaaggaggttatcgtgcttgtcgagctgcgtgcgaggtttgatgaggctaacaacatagagatgtcacaccgccttgaggacgcaggctgtcagatactttacggactcggtgattacaaggtccactcaaagctctgcctcatcacaaagaaaaagggcgatggctttgagtacatcactcagattggtacaggaaactataacgagaagacctcgcgcctttatacagatttatccctcatcactgcaaatcaggagattggagcagatgcatcaagggtgtttatggcgcttcagagaggtgagactgtttcggacggagatgtaaaacatctgcttgttgccccaaaatgcctgcagaataaaattgttgacatgattgatgagcagattgccaataagaatgcaggaaaaccggcatacatcggagttaagattaactctctcactgataaggtgcttatagacaagcttatcgatgcatcacaggcaggcgtgaaggtagagcttattgtcagaggaatctgctgtgtgaagccacaggttgagggcgccacagaaaacatcactgtaataagtgttgtaggaagatatcttgagcattcacgtatatacagatttggtgtgggcgatgatgagaagatttacattgcgtcagcagattttatgaccagaaataccgtaagacgtgtggaggttgcaacaccggtatacgatgcacatgctaaggacaagatccgccatatcttcgatacaatcatgacagacgacgagaagggcaaggagctttgcgctgatggtgagtatgtggacagaaagataaacagcacaccgatagattcgcaggagcagttctttgaggaagcatacaaaaatgccgataagagtgcggacaatcagtaaaatgaggtaattgcataaagatatggaatatatcttaagcttattggaggaaagaatagtataatgggaaaaaaagaagcaaagacaaatgcaataagaatactggaaacaatgaagattccatatgaggcacgcacatacgagtgcgatgactttgtggatgcagctcagatagcagacaagctggggcttgaccacgcaggcatgtacaagactatcacgacagtcggcaaaagcggcggatactatgtgtttgtggtaccgatagatgacgaaattgatttcaaaaaagccgcaaaggcagcaggtgagaagtccatagagatgctgcatctcaaggatttgacaaaggttacaggctatataaggggcggctgtacatcaatcggcatgaaaaagcagtatcctacatttatccatgaggcagctaaggagcaggacaaaatcacggtcagcggaggcaggcttgggcttcagattacgctgtcaccggatgatttatgcagggcggcaaaggcagagtatgcagatattataaaataattaaaatgagagttctttttcctaggcttttacacgtcagtgtgttataataaagaaagctggcgattgctaagacagacggtttggcgaataaacctacattgcaatcgtaataatagaactaaagcagaggaataatagagatggaaaaaattattttaacaggagacagaccaacaggaaggctccatataggacattacgtgggctcacttcgcagaagagttgagcttcagaattcaggagagtatgacaaaatatttatcatgattgccgatgcacaggcactcacagacaattttgacaaccctgagaaaatcagacagaatatcatagaggtagcacttgattacctctcagcaggactcgatccggccaagtctacactgtttgtgcagtcacagataccggagcttacagagcttacatttttctactcaaatctcgttacggtatcgagacttcagagaaaccctacagtaaagaatgagattaagctaagaaattttgaggcaagtataccggttggcttcttcaattatccaatcagccaggcagcagatatcactgccttcaaggctacaactgttccggttggagaggaccagctcccaatgatagagcagaccagggagattgtcagaaagtttaattctatctatgatgaggtactcgttgagccggatgtgcttttacctgagaatgaggcatgctgcagacttccgggtacagacggtggacagaagatgagcaaatcattaggcaactgtatctatctggcagatacagaggctgatgtaaagaagaaaatcatgagcatgtatacagatccgacacatatccagatttcagatccgggacatgtggagggcaatacagtattcacatatcttgatgctttctctaagccgggacattttgaggagtatctgccggagtatgctaaccttcaggagcttaaggatcactatacaaggggcggtcttggtgatgtgaagattaagaaattcctcaacaacatcatgcaggaggagctttcacctatccgcgcaagaagagcagagtatgagaaggatattccggctgtatatgagatactaaggaagggcagcgagacagcaagagagactgcagcacagacaatggcagaggtcaagcgcgccatgaggataaattactttgaggatgcagagcttataaagagccagagtcagaaatacgctgagaagtaatatattttatttcaaagacaatacgttagtgatgtcaaaatattttgtggcattatgtgtgtcataaaagccacggggaggcaccatggtcaagttttacaggacagatgacaaattaatacatgagctggatacgctgcagggaggtacctggatacagatggtcaacccttctgtagcagagggacagatggtagcggatgatctgaatgttgatattgaggacgtacttgcagcactcgatgaggaggagagctcccgtatagagctgcaggatgggtatacgttgattcttgtggatataccttcgatagagactaggcatgacaaggagtcatataccacaatcccacttggcatcatacttacagatgatgagatagtgacagtctgtacagaggatacaccggtgcttcaggtatttttaaataaccgtgtaaaggaattttccaccaagaaaaagatgcgctttgtataccagattctttacaggatatctgtactgtatcagaatgatctgcgcatcatagacaagatgcgtactgagattgaggagagagtcggagaggatacagaggaggacgatttgattgcgcttcacgagctggaatccacactcgtatactttgccacatcgcttcgtgccaatggagttgtgttagagagactgaccagatacaagcgccttgagcagtatccggaggacaaggagcttctcggagatgtaattgtcgaaaataagcaggctattgagatgacgggaatttacagggacatcataaatggtaccagagagcttatgagcacggtcattgacaacagacttaacaatgtcatgaagtcgctcacaatcatcacacttatcatggctattccgacagttatctcaggaatctatggtatgaatgtcagctcaaagtgggtgccgcttgcgacgacagcacacggatttatgattataataggtgttatggttgtcatatgtgtgctgatactgattttactgaagaaaaaaagaatattgtaatatattgcgtattcattaaaagaccgcagtatttcatagaaaataatgaaatactgcggctgattttattttagagctgattagcagatactttcaaagcgtccgcttgcaccacaaggcagcacgagtccgtttgaagaaacagggagaccaatttcgcttgcggttaccttaccatcaaactttttaagtgcagtgcttatcatataggtgagcactgcaggctgcaagccagtcgtataggaattaataaggaagaaaagcggcttgtcggtaaggagctttgcacaaagctgcacaagcggatatacgctttcctcgattttccaaatttcacccttaggacctctgccgtatgacggcggatccattatgatggcatcgtaatgattgccacggcggatttcacgctcaacaaacttcacacagtcatccacaagccatctgataggtgcgtcaccaagaccgctgcttgcagcgttttccttagcccatgtgaccatgccctttgaagcgtccacatgtgtgacagcggcgccagcggcagcggcagcaagagtggcacctccggtgtatgcaaagagatttaatacctttacatcacgaccgctttttttggcatcataaatcttctttgaaaaccagtcccaattggcagcctgctcaggaaacagaccggtgtgcttgaagctgaatggttttaagtgaaatgtgagctctttattaataggaagagagtagtttatggtccactcctgcggcaaatcaaaaaactcccactcaccgccgcctttcttgcttctgtgatagtgaccgttaagctttttccagttcttattagtctttggagtgtcccaaattacctgaggatcgggacgcagcaaaatatatttagaccaacgctcaagcttttcaccgcatgagcagtcaattacctcataatccttccatctatctgctaaccacatatgtttgtattcctttcttacctgcgtgcaaaaaataaactacacgttgcttgaattaatcgagtatcttctatataatatacgtgcaaaagcgtaatttttcaatggaatattatctgaaataaaaaaataaattttttttaaaaaaggtattgcaattattgcaaacgtcatgtataatatcacttgctgtggcatgatagctatgaagtttgaagttactgtccatgagacagagaattcggcggagcgaatgtcaagttaggaaactgacggcaagtcactgtacagaacagatatggtctacaaaatgtagaaacaacgtgtgaaagtccacaggacacacacggagatgtgtacagtcaccgcttgtcgtactgaagttaaaagtgcgaaaaggaggcgactttttttatggcaagtcaagtaatgagaattactctcaaggcgtatgatcacgagttagtagattcaagcgcaaagaaaatcatcgagactgtaaagaagaatggatcacaggtgagcggaccggtacctcttccaacaaagaaggaagtagttacaattcttagagctactcacaagtacaaggattctcgtgaacagttcgagcagagaactcataagagacttatcgatatcatcaatccaacacagaagacaacagagtctttatcaaggattgaaatgccagctggtgtttacattgatatcaaaatgaagcagaaataagcttcaacaattaattagtatatccccgaatggtttatatagaagatacagtgcgaaagcataacgatctagtaggctgctctaggatgaacggttccgctacttgttccggctaattcttcgcgggctgggttgacaggcaagaggcgttccgctgtagaaaacaggaggtaaagaaatgaagaaagcgattttagcaacaaaaatcggtatgacacagatcttcaatgcagatggtgtattagtacctgtaactgtattagaggctggtccatgtgttgtaacacagatcaaaactgttgagaatgacggttacagcgcagttcaggttggtttcggcgacaagaaagagaaagtcgttgagaaagatgccaacggtaaaaagagcgtagcacacagacatggtgttaacaaggctcagatgggacacttcaaaaaagcaggtgtttcaggaaagagattcgttcgcgagttcaaattcgaaaacgcagatgagtacaatttagcagatgagatcaaggctgacatctttgcagagggtgacaaggttgatgtaactgctatttcaaaaggtaaaggtttccagggtgctatcaagagattaggtcagcacagaggaccaatggctcatggttctaaattccatcgtcatcagggttctaacggtgcttgttcttcaccaagtaaggtattcaagggaaaaggaatgcctggacacatgggtagcgtaaaggttacaactcagaatcttgaggttgtaagagttgacgcagacaagaacttactgttaatcaagggcgcagttccaggagctaagaaagctctcattacagtaaaagagactacaaaatctggtaaatagtgcaaagtaagaaaggaggaactttacgatggctaacgtagctgtatataacatggaaggcaaagaagtcgacaagatcgagttaaatgattccattttcggcgtagaaattaatgagcatttagttcatatggctgttcttcagcagcttgcaaataaacgtcagggaactcagaaagctaagacacgttctgaagttcgcggtggcggaagaaaaccatggagacagaagggaacaggacatgcacgtcagggttctacaagatctccacagtggacaggtggtggagttgtattcgctcctactcctagagattactcattcaagctcaacaagaaagagaagagagcagctcttaagtctgcacttacatcaagagttgttgagaacaagttcgttgtagtagatgagcttaagcttgatgagattaagacaaagaaattcgtagaagtattaaaaaacctcaatgttgagaaggcactcgttgtattaaatgatatggacgagaaggttatcgcttctgcagcaaacatcccgacagttaagacaactcagacaaatgagcttaacgtattcgatgtattaaaatatgacacagtagtagttacaaaggctgctgtagcaacaatcgaggaggtatatgcataatggcaaacgtacagtactatgatgtaatcctcaaaccagtagtaactgagaagagtatgaatgcaatggctgagaagaaatacacattccttgttcacccggatgcaaacaagactatgatcaaagaagcagtagagagaatgttcgaaggaacaaaggttgccaaagttaacacaatgaactgcgaaggcaagaacaagcgtcgtggaatggtaacaggaaagactgctaagacaaagaaggctatcgtacagcttacagcagacagcaaagatatcgagatcttcgcaggactgtagaccgaaagcaacttcaaaatgatatgcgtcagaaaagacgcgataatgaaaacatatcgaaaggagaaacaaaatgggaattaagacatataacccatatacaccttccagaagaaatatgactggttcagatttctcagagattacaaagacaactcctgagaagtcacttgttacttctttaaagaagaacgctggtcgtaacaatcagggtaaaatcacagttagacaccagggtggtggaaatagaagaaaatacagacttatcgatttcaagagaaataagaaagacggtattccagcaactgtaattggtatcgagtacgatccaaacagaacagcaaacatcgcacttatctgctatgcagatggtgagaaatcatatattcttgctccagcaggacttacagacggaatgaaggttatgagcggtgctcaggctgaggtcagagttggaaactgcttaccacttgagaatatcccagttggtacacagatccacaacatcgagctccttcctggaaagggcggacagcttgttcgttcagcaggacttagcgcacagcttatggctaaagaaggcaaatatgctacacttcgtcttccttcaggagagatgagaatggttccaattcagtgccgtgctacaatcggtgtaattggaaacggagatcacaacctcgtaaatattggtaaagccggacgtaagcgtcacatgggtgttcgtccaacagttcgtggatctgttatgaaccctaacgaccatccacacggtggtggagaaggtaaggcacctgtaggacgtccaggaccatgtactccatggggcaaacctgcacttggcttaaagaccagaaagaagaacaaacagtctaacaagatgatcgttcgtagaagagacggtcgtgcaatcaaataattaggaggttgaataaatggcacgttcattaaaaaaaggaccatttgctgatgaaagcttacttaaaaaagtagatgctatgaacgcttctggtgacaagtctgtaatcaagacatggtcacgtcgttcaacaatcttcccttcattcgttggacacacaatcgctgttcatgatggaagaaagcatgttcctgtatatgttacagaggatatggttggacataaacttggtgagttcgttgcaacaagaacttacagaggacatggaaaagacgagaagaaatcaggcgtaagataagatttattgaaaggaggtttcatccatggcaaagggacatagatccaaaatcaagagagagagaaatgaagttagagatacaagaccttcagcaaagttatcttatgctagagtgtctgtacagaaagcttgtttcgttttagatgctattcgtggaaagagtgttaacgaagcacttgcaatcgtaacatacaatcctagatatgcttcaagcttagtaaagaaattattagagtcagcaatcgctaacgcagaaaataattatccggaaaagaactataaggcagagaacctttacgttgcagagtgttttgcaaataaaggaccaacaatgaagagaattcatcctagagcacagggtagagcttacagaatcgagaagagaatgagccacattacaatcgtgcttgatgaaagataggaggcaatcatgggacagaaggttaatcctcatggcttaagagttggcgttatcaaggactgggattccaaatggtatgcagagggtgatttcgctgattacttagtagaagattataatatcagaacatttttaaagaaaaaattatacgcagctggtgtttcaaagattgagatcgagagagcttcagaccgcgttaaggttatcatttatacagctaagccgggtgttgtaatcggtaagggcggagctgagatcgagaagatcaaggctgaggttcagaagcttacagacaagaaattagttgttgatatcaaagaagtaaagagaccggacaaggatgcacagcttgttgctgagaacatcgctttacagcttgagaaccgtgtttcattccgtagagcaatgaagtcttgcatgggaagagctatgaaggccggcgttaaaggaattaagacaacatgttcaggtcgtcttggcggagcagatatggctcgtacagagacatacaatgatggaactactccactccagacaatcagagcagatatcgattatggattcgctgaggcagatacaacttacggcaaggttggcgttaaggtttggatctacaaaggcgaggtacttcctacaaaagcaaacaaggaaggaggagctaagtaattatgttaatgcctaagagagtaaaacatcgtaaacagttccgtggttccatggcaggaaaagctacaagaggaaacaagatcacaaatggtgagtacggtattgtagcacttgagccatgctggatcaaagcaaatcagattgaggctgcccgtgtagctatgactcgttacatcaagcgtggtggtaaagtttggataaagattttcccagagaaacctgtaacacataagcctatgggtgttcgaatgggtaaaggaaagggtgcccttgagtattgggtagctgtagtaaaaccaggtagagtattatttgaaatctccggagtaccggaagacgtagctaaagaagctttacgtcttgctacacacaaattaccttgcaagtgtaaagtagtttctcgtgcagatttagaaggcggtgagtcaaatgaaaactagtgcatacgttaaagagttacaggcacagagcgtagagcagttacaggcacagctcgttgatgctaaaaaagaacttttcaatttaagattccagaatgcaactaaccagttagataacacagcaagaatcaaagaggttcgtaagaacatcgctagaattcagactgttatcactgcaaaggctgcagaatagtttatcctatcagaaaggagattttagaccgtggaagaaagaaatcttagaaaaacacgtgttggtgttgttgtaagcgataagatggataagacaatcgttgtagctgtaagagataacgtaagacatcctctttacaacaagatcgttaagaagacttataaattaaaagctcatgacgagaaaaacgatgcaaagatcggtgatacagtcagagttatggaaacaagacctttatctaaagataagagatggagacttgtagaaatcatggaaagagcaaaataataaaaggaggctacaagcatggtacagcaggaaagcagactcaaggttgctgataacactggcgctaaagagttacttgttatccgcgttatgggtggatctaccagaagatatgcgaacatcggtgatgtaatcgttgctactgttaaagatgcaacaccaggcggtgttgttaaaaaaggcgatgtagttaaagccgtagtagttcgttcagtaaaaggtgctcgtcgtaaagacggatcttatataaagtttgatgagaacgcagcagtaatcatcaaagatgacaaaactccaaaaggaacacgtatatttggaccagtagctcgtgagcttcgtgagaaacagttcatgaagattgtttctctggctccggaagtattataggaggaacgtcaatggcaactatgaaaatcaaaaaaggcgaccttgttaaggttatcgctggaaaagatatcaacaatgagggcaaggtaattgccgtaaacgcaaagaacaatacacttcttgttgagggaatcaacatggttactaagcatacaaaaccaagtatgtcaaatcagcagggcggtatcgttcatcaggaggctccaattgatgcttccaacgtaatgctcatccatgacggaaagcctactcgtgtaggattcaagatggatggagacaagaaagttcgctttgctaaatcaacaggcaaggttatcgactaattggagagaggaggattaagacattgagtagacttagagaacagtacgaaaatgagatcaaggacgcaatgatcaaaaagttcggatacaaaaacgcaatggaaattccaaagcttgacaagatcgtagttaacatgggtgttggtgaagctaaggaaaacgctaaggttcttgaggcagccgttaaggatatggaagccatcacaggacagaaagcagttacaactaaagcaaagaatgctatagctaactttaaaatcagagaaggaatgccaatcggatgtaaggttacattacgtggtgagaagatgtacgagtttgcagatcgtctcatcaacttagcattacctcgtgtacgtgacttcagaggtgttaaccctaacgcatttgatggccgtggaaactatgcccttggaattaaagagcagatcatcttccctgagatcgagtatgataaggtagataaggttcgtggtatggacattatcttcgttactactgctaagacagacgaagaggcacgtgagttactggcacagttcaatatgccattcgctaaataatcggaggaattctaatggctaagacaagtatgaaaatcaaacagcagcgtgcaccaaagttctctacaagagcttatacacgttgtagaatttgtggacgtccacattcagttttaaagaaatacggaatctgcagagtatgcttccgtgagttagcatacaagggacagatcccaggcgttaaaaaagctagctggtaagcctgaaagcaacttagtgaacacaagcgcatatgcgctgtgtgagcttagtgcgaagagaacttcctttcagcaacagctgttttataaataactatattaacaaacatatttaaggaggatatcgttcattatgatgatgacaagtgatccaatcgcagatatgcttacaagaattcgtaacgcaaatactgcaaaacatgatacagtagacatcccagcttctaagattaaagtagcaatcgctggaatccttgtagatgagggattcatcgagaaatacgacatcgttgaggatggaaaaatcaagacaatccatgttacattaaaatatggtgctgataagaacgagaaggttattacaggcatcaagagaatttctaagccgggtcttcgtgtatacgcaggcaaggatgagattccttcagtacttggtggacttggaatcgctattctttcaactaaccagggtatcgtaactgataaagaggctagaaagcttcaggttggtggcgaagttttagcattcgtttggtaacccctaaagatcttaatttatattaagtataatttattaagtatccatattcgatgcatccatgatgtatagtagggatacagcaagtaacatcttaaagtataacctgaccacaaggtcagaaatactaaataactattaacctaatatcaaaatataggaggtacgggcatgtcacgtataggaagaatgccaatcgcagttcctgctggagtaacagttgaaattgcagaaaataatcatgtgactgtaaaaggtccaaagggtactcttgagagaactcttccatcagagatggatatcaaattagagggtgaagaagtagtagttacaagacctaatgatttgaagaaaatgaaatccttacatgggttaacaagaacacttatccacaacatggttgttggtgtaactgagggttatacaaagactcttgaggttaacggtgttggttacagagcttctaaggctggaaagaaacttactcttaacttaggatattctcatccggttgagatggaggatccggaaggacttgagtcagaggttcaggataacaagatcatcattaagggtatcgataaagaaaaagttggccagtacgcagctgagatcagagataagagaagacctgagccatataagggcaagggaatcaaatatgctgatgaggttattagacgtaaagttggtaagactggtaaaaaataattaaaggagtggacaagtaatggttagtaagaaatcaagaacagaagttcgtgtaaagaaacataacagaatgcgtaatcatcttgctggtacagcacagcgtcctcgtttagctgtattcagaagtaataaccatatgtatgctcagattattgatgatacagttggaaatacactcgtttctgcatcaacacttgacaaggatatcaaggcagagctcgagaagactaataacgtagatgcagcagcaaagcttggtactgtaatcgcaaagaaagcattagataaaggtatttcaactgttgtcttcgatagaggcggttttatttacgcaggaaaagttaaagcattagctgaagcagcaagagaagctggcttagatttttaggaggagacaaacatgaaacgtgaaatcattgacgctagtcaattagaattagttgaccaggtagttgacatcaagcgtgtaacaaaggttgttaagggtggacgtaacatgcgattcacagctctcgttgttgttggtgacaagaacggccatgtaggtgcaggtcttggaaaagcagcagaaattcctgaagctatccgcaagggtaaagaggacgccatcaagagcatggtaaatgttaagttagacgagaacaactctattacacatgatgtaacaggaaaatatacaggtgcttccgtattattaaagaagtctcctgaaggtactggtatcatcgctggtggtcctgcacgttcagtatgcgagatcgctggtatccagaatatccgtacaaagtctttaggatcaaacaacaagcagaacgtagtacttgctactatcgaggctcttaagcagttaagaagccctgaggatgttgcaaagcttcgtggtaaatctgtagaagaaatcttaggttaggaggaacgctaaaatggcagatagagttaaagttacattaatcaaatctacaatcggtgctgttcctaagaacaagaagactattgaggctcttggtcttactaagttaggcaaaactgtagagttaccaaacaatgcagctacacagggagctgttcgcaaagtagcaccatacgtaaaagtagaagaagtttaagaataaaataaggaggtaccgtgatggatttatctaatttaaaagcggctgagggttcagttcatagtgataatttcagaagaggtcgtggacacggctcaggaaacggtaagactgctggtaagggacacaagggacagaaggctcgttcaggagctccaagacctggtttcgaaggtggacagatgccattatatagaagattgcctaagagaggtttcaagaatagaaacactcttacaatcgtacctataaatctttcagctcttgagagattcgataacgatgcagtagtttcagttgagacattaatcgaggctggaatcgttaagaatcctagagatggcgtaaagattcttggaaatggagaacttactaagaagcttacagttcaggctaacgctttcagtgctagtgcaaaagagaaaatcgaagctcttggtggaaaagcagaggtgatctaatgcttaaaacactccgtaatgcgtttaaaataaaggatgtccgtaatagaatcctttttacattcatgatgcttattgtcatcagaatcggaagcgagcttccgattcctggtgtcaagggctccgtatttcagagttggttaaacagtaaatcagcagatggtttaggctttgttgatgctataacaggtggatcattctcacagatgtcagtatttgcgctgaatattacaccatacattacatcttcaatcattatgcagttgcttacaattgctatacctaagcttgaagagatgcaacgcgatggcgaggatggcagaaagaaaattgttgagataacacgttatcttacaatagcattaggccttcttgagtcagtcatgatggtaattggtttttacagacaaaattaccttacagaaaagacaccattgactgttattatggtcgttacttcacttacagcaggttcagctgtacttatgtggattggagagcgtattacagaaaagggtgttggaaacggaatatcaatagtattgacaatcaatattatttcacgtattccagaggatttaagtacactttggtcacagttcattgcttcagcagcgaacattccaaaggcgattgttgcaggtcttatcatagtagcaataattgctgcaatggtagtatttgtagtattgcttcaggatgcacagcgcaagattcctgtacagtactcaagcaaaataagaggcaacaagcagatgggcggtcagcagacatgcattccactaaaggtaaataccagtggagttatcccggtaatctttgcacagtctcttatgcagacacctgttatcattgccagcttccttggaaaaggcaatggaaatggaataggctctaagatattaaaaggattatctcagtctaactggtgtgatccaaaggagccggtatattcaatcggacttattgtttacattgtgttgattatagcatttgcttatttctacacaaacattacattcaatccgcttgagattgcaaacaatatgaagcgttcaggtggctttatacccggtatcagacctggaaagccaaccagcgattacttaaatcagatattaaactacattgtatttattggagctattggacttgcgtttatcgcatttgttccgatattcttcaatggagtattcaacgcagacgtatcctttggtggaacttcaatcatcatcattgtcggagttattattgagacattgaagcaaattgaatcacagatgagagttcgatactataaaggatttttagatgattaattgtacattggagatactgaattcagtatctccattcgtgctatcaacaagttttgtataaaaggagaaaatttttatgaagatcatcatgttaggggcacctggtgccggtaaaggtacacaggcaaaacagatagctgcaaaatattctataccacatatctctacaggagatatattccgtgcaaacatcaagaacggaacagagcttggtaagaaggcaaagacttacatggatcagggagcacttgttccggatgagcttacctgtgaccttgttatggatagaatacagcaggatgattgcaaaaacggatttgtattagacggttttccaagaacaattccacaggcaaaggcgcttgatgatgctctcacaaagattggggagaagatggattatgccatcgatgtagatgttcctgatgagaacattgttaaccgtatgggtggaagaagagcctgcctcaattgtggtgcaacatatcatatcgttttcaatccaacaaaggttgagggcaaatgtgatgcatgtggcgctgacacagtactcagagatgacgataagcctgagacagttcagaagcgcttggctgtatatcatgagcagacacagccgcttatcgagtattatgacaagcagggtattttaaagtctgtagacggaacaaagcctatggatgaagtattttcagccattgtaggtattttaggtgaataataatgtctgtaactataaaatcagagcatgagatagagctgatgagggaggccggcaggattctggccgccgttcatcagcagctcggtaaagaaatcaaaccgggaatgtccactaaggatgtggaccggctgggcgaagaaatgattcgtagttatggatgcgagccgtctttcttaggatattgcggatatccggcctccatatgtgtttcagtaaatgaggaggttgtacatggtatcccgactgatgagcgtatcttacaggagggcgatatcgtgagccttgatgctggtgttatctacaaaggataccactcagacgcagccagaacagtaggcgtaggagagatttcagaggaagcaagacttcttatagaaagaacacgtctcagtttttttgcaggaataaagaatgcagttgcgggaaacagactgtatgatatttcaggagccatacagcagcttgccgagtcttttggatacggagttgtatatgaccttgtaggtcatggcataggaagccatttacatgaggatcctgaggtgccaaacttcagaccacagggctttagaaaagggcttagacttaagccgggcatgacactggcggttgagccaatgattaatgcaggttcaccgcatgtggtgtggatggatgacgaatggacagtggttactgaggatttatcgttgtcggcacactatgaaaataccatacttattacaaaaggaaagccggagatactttctctgacagaggatgaaaaagcagccggatttctggagctaatctaataataatcataacgaaacccaaggatttatttacaggaggaatcaaaatgtcaaaagcagacgttatcgaagttgaaggtgttgtagttgagaagttaccaaatgcgttttttaaggtagagcttgagaacggacaccagattttagctacaatcagtggaaagcttcgtatgaatttcatcagaattttaccgggagataaggtaacaattgagatgtcaccatacgatctgacaaagggcagaattatctggagagataagtaatttttacagataattttttaaaaaaatatattgacttcccttaagtgtccgtgtataatgctatctggacacttttggaaaagtacctgaaaaggacttttatagagaaaggaggatttgctgtgaaggtaagatcatcagttaaacctatttgcgaaaagtgcaaagttatcaagagaaaaggaagcatcagaattatctgtgagaatccaaagcataagcagagacagggttaatttgtacaaatatttgaccctgttatttgtgcgtttggtttattaaaccttttttcacatcattatgtgcggctgcagcgagatatttatcatcgctgttcataataaacagaggcattctggtttcatattataataccgagtgatatggaacaaaatgcaaatatgggagcgcatatggctacacacatttcaggacgtgcaaccgtagctgtagatgcatatgtgtttcggagagtatacatcaagttgcagatgtatcgttactatagtaaataactaaaaattatggaggtgtaaacacacatggctcgtattgcaggtgtagatttaccaagagaaaaacgtgtagaaatcggcttaacttacatctacggaatcggaagagtaagtgcagaccgtatccttgaagcagctaatgttgatccaagcactcgtgttagagatcttacagatgacgaggttaagagaatcagcgctgttatcgacgagacaatgacagttgaaggtgatttaagaagagaaatcgctttaaatatcaagagacttcaggaaattggatgctatcgtggtatccgtcatagaaagggacttccggttcgtggtcagaagacaaagactaatgcaagaactcgcaagggtcctaagagaacagtagcaaacaagaagaaataatcacttggaaaataagtgaaaacgccacttgaacgtagtgtgcgtttagttctgcggacgaagaagcagagcttcattataacttaaataaagtttagaaagtagaaagtaggttagtttaaatatggctaagaatgttgcaaagaaaacaactaaaaagcgtgtaaagaaaaacgttgaacgcggacaggcacatattcaggcatctttcaataacacaatcgttactttaacagatgctgaaggaaatgctttatcatgggcaagtgccggtggtcttggatttagaggttcaaagaaatctactccatatgctgcacagatggcagcagaaacagctacaaaggcagctttaatccatggattaaagacagttgacgtattcgttaagggaccaggttcaggaagagaggcagctattcgtgccctttcagcatgtggtcttgaggttacatcaatcagagacgttactccggtacctcacaatggatgtcgtccaccaaaacgtagaagagtctaatcaggaggtatagattaaaatggcagttaataaagtacctgtacttaagagatgcagatcacttggtttagagccaagttatttaggatatgataagaagtctagaagaaaccttacaagagcaaacagaaaggtgtctgagtacggacttcagttaagagaaaagcagaaagctaaattcatctatggtgttttagagaagcctttccgtaactactacaagaaagcagatcagatgaaaggattaacaggtcttaaccttatgacaatccttgagtcaagaattgacaacgtaatcttccgtcttggtttcgcaagaacaagaaaagaagctagacagatcgttgatcacaagttcgttacagtaaacggaaaagttgttaacatcccttcataccttgtaaaggctggcgatgttatcgaaattaaagagagcaaaaagaatactcagagaatgaaagatatcgtcgaggtagctggcggaagaatcgttccggagtggttagacgtagatgctgagaaattacagggaactgtaaaagacttacctacacgtgagcagattgatgttcctgtagatgagatgctcatcgtcgagttatattctaagtaaaattaggttgatttgccggggatttatttcccggcttatccactctttgataacatataacaacgatacccgagaaggagggaatttgaagtgttcgattttgaaaaaccaaaaattgaaatcgcagaaatttcagaagacaagacatatggcagatttgttgtagagccattagagagaggttacggtacaacacttggaaactctttaagacgtatcatgctttcttctttaccgggcgctgcagtaagtcaggtcaagattgatggtgttttacatgaattcagctctattcctggtgttaaggaagatgttacagaaatcatcatgaatatcaagaaccttgcaattcgcaataatagttctacaaatgaaccaaaggttgcatatatcgaattcgaaggtgaaggcgttgttacagcagccgatattcaggttgattcagatatcgagattttgaatcctgagttagagattgcacacttgaatggtggtgcagattctaagctttacatggagcttacaatcacaaacggcagaggttatgtcggagcagagaagaacaagaacgaggatacaccaatcggagttcttgctgtagattcaatctacactcctgttgagcgtgttaaccttactgtagagaatacccgtgtaggtcaggttacagattacgataagcttacattagatgtatttacaaatggtacattggagccggacgaggcagtcagccttgcagctaaggtgttaagtgagcacttaaatctgttcatcgatctttcagaggcagcacagcaggttgacgttatggtcgagaaggaaaacgatgctcaggagaaggttcttgagatgaacatcgatgagcttgagctttcagtccgttcatacaactgcttaaagcgtgcaggaatcaacactgttgcagagcttatcaatagaacacctgaggacatgatgaaggttcgtaaccttggtcgcaagtctttagaggaagttttagcaaaattaaaagaattaggtttagagttaaatcagactgaggaataattcattcgaataatccttgcactgattcttctaaataaattggtcatatataaattttaaatatcatatttatgtttatgtgtgacaaaactcatagcggcagggccagtaagaccaaagagcgtgaccgtgtctgatacatgagtggcaactgatttgagcatttgctttttgaaataaggcaaagctttatcacaacaagatacgatgtctggcagtaagaccgaagagcgtgaccggatgtcccacaaatggaggaaattaaaatggcaaaatatcgtaagttaagcagaacatcaagccagagaaaggctttactcagaggtcaggttacacagcttcttgttaacggaaagatcgttactacagaggctaaggctaaagaggttcgtaagatcgctgagggtcttatcgcattagcagtaaaagagaaagacaacttcgaggaggttactgtaacagctaaggttgcccgcaaggacaaagatggcaagagagtaaaagaggttgtagacggaaagaaagttactgtttatgacgaagtagagaagaagatcaagaaggattctgcttcacgtcttcatgccagaagacagatgctcaaggttctttacacagctaaagagtctgacggcacaaagaagggaacaaagactatcgatgtaacaaacaagttattcgatgagatcgctcctaagtatgctgatcgtaacggtggttacacaagaatcgttaagattggacagcgtaaaggtgacggagctttagaggttctccttgagttagtttaatatttgatcggtataaatcttagactaaataaaaccagagatttgagtggatgacactcacttctctggttttttatattactaagataattattctaaactttgagaaaaactgatgcgtcttatttgcatgtatagttcgactgcctttggtttgaattcgtaactgtaacgcataaaaatacccctttcactggatatccagtaagaggggtatatattaatttcacacggctttttataaatgcgcttaattatttattctttgctgcagcctgctcgtcattgtacttctgaacacacttcttgattctgtcatatggtgagagaagatcactgatagaacagtcgtggtttaatgtatcaatgaggtatgcgatgtatttgctcatgtcacagctgatatagtactccttagagagaagctccggtgactggtagataaggtttgttgtaactactctgtagatgagaccatcctcgtaagccttgtcaaatgaagcaaagccgtttgtaaagagaccgaatgtagaaacaacaaagattctgttagctttacgcttcttgagctctcttgctgtatcaatcatactttcgcctgaagaaatcatatcatcgatgataagaacatccttaccctccacatttgttccgaggaactcatgagctacgatagggttacgtccgtcaacgatacggctgtaatcacgacgcttgtagaacatacccatgtctactccgagtacgtttgcaaggtagatagcacggtttgtagcgccctcatcaggagagataatcataagatggtcagcatcaatagtgatatcctttacgttctttaagatgcccttaatgaactggtaagaaggcattacattctcaaagccgttcagaggaatagcatttaccacacgagggtcatgagcatcgaaggtgatgatattgtctacacccatgttgataagctcctgaagagccaatggacagtcaagagactcacggcctgtacgtctgtgctgacggctctcataaaggaaaggcatgataactgtgattcttcttgcttttccgccggctgcagcgataacacgctttaagtctgcgtagtggtcatcaggtgacatgtggtttgtctgaccgcatactgtgtaggtaagactgtagttggttacatctaccatgatgtacagatcataaccacgaactgactggttgataacacatttagcctcgccggaaccgaatctaggtgtagaaggcttgataatgtagctgtttttgtagtagtccttgaaagcactctcgttagcatgctggtgctctctgtgctctctccagccctgtaagtatgcatctaccttctgggcaagacctatacaactgtcggttgcaacaagtccaagtgtaccggttggcatagtctccaaaattctctcatcgtttggcattgttattcctccatataaccatataataaataaactaaatatataatataaaaagcgttatttggaaagacgctttttaattcgtatgtcatctccaaagagcttgataaaactataattgcttgaaattcttgaaagtgttctctcggagtaaatatctgctatctgctccagattcagattagtggaaataatagtagatttctgtcgcagtatgcgctcatttacacaaaggaaaagctgtgatgtggtaaatgagttggaaagctcggttccgagatcgtctatgataagtaaatcacagtcgaatatattctggtgcgctgcgatggcatctgcatccttttcaaacacacctttgcttaatatatcaaataattggaatgctgtaaagtaaattacggagtaacctgcatctaaaagctcttttgcaatgcaattagataaaaaagtctttccgacaccggtattaccgtagaaaaatatgtttttaggtttgttttcaaaattgtctataaattcatgacagtttgtcactgcaagctttgctgtggcaagagcagacagccctgtcgcaggatttttctgctcatctgagtaataatcgaatgagagcgtggaaaaattctctcttgataaaatctccctgatattggactgcgaataaacggtattgataatagcctgcttgaaacaatgacatttctgaccatctatatacccggtatcatggcaatctggacaggtgtaaatagggtcaaaataatcaagcggatatccgagtgtggatagcagtgcagcacgctcctccttatagtcctcgattgcaaggcgtaaagtggcaagagcattctcatcaccatccatgagcctgtaggcctgtctgactgaggctgatgctatctctgaatcaatttccctgaggcggggcgccttgcgataggcttcctcaatacgtttgtcatgtatgtatttgttctgaagctggcgtttatcgtagcctcgcattatctcatcatattgagcattggtaagtgccatatatcctccttgggatgtgtaaatctaacttgaaaaatcataccgtagaattcagaaacagcttctccagcttgtcgtaatcattgtttcgctgattgaagttgttaaatttattcttggaacttgaattattgcttttgggttttgaggaaccgtttgcagcatttgtactctgtgatgagccggtagcagaggctttattggccttggcaaagttggcatcaagcacttcaacatcctttaatgtatgtacatcctttttcctccagttcgcgagtatcgagtctgtgtactcgaagcttggcttctggatagctgaaatggttttactgcaggcggcctttacaagctctatatcgaaaccgtattcgccgacccatttgtttattagtgacacctcagagtcaaccagattgcggcctgtgatgcctagagccttcattacagaatagtaaatctgtgagtgagcggctgcatcgtcctttgcctggtctacggtctttatgccggcatcggcccagccgagagcgaccttgttcatgtaacgaaggcttgaatgtcctttggtaatgcagtactctacgagatattctaccaggtcggtagaaaaatgaagctcgtccagccagtagagcaccatattggtgtctgtggatgagagcgtatgcttcagatatgtctctataataaagaaaagctctgaaatgtcaggattctttctaaactccttaatctcatcaagtgtgtattccttctgtgaagaagcagctttgtcaggagtctggctcttaagcttttccacaacagaatcatgcatccgagtattcacggtagaaatattctgtgcagcattattaaccacgctgttttgcaaaatattctgtgcagcattattaactacgctgttttgcaaattattctgcgcggcattatcagccacagcgctttgtatattactctgagcagcctgcataccggatacagaaagactgcagaggttgattcccataatctggccatcagcgccggtttgcacctgcaaaatgccctcagaggcccagtaattgagggcacgtatgatgtcggcttcagtattgctgaaatgatcggcaatctctgaaatagttgctatgcctgccccggagcctgtcgcacggagcagataaaggtataccttgacaaactcaccgtttgcctttggcatgtattgatctataaaaatatctgacacagtagtgaatgatgttgctatgtcactgctaatgtttatcgctgtcatataaaaaactctctttcgcttaacctgtgagcaattatagcacaatattttaaccgtgtgaagatggtaaaagtgctacaagccttgtaaactcgggctttccgagtccacaaaaaaatgtggataacgtggataactgtgtaaaataattgaaaaatcaatgtatcacagggtatataagctgttgaaaattatttaaaaaatccacacacaaaatgagagttgttaacattttgtatgtggataacgtggataacttatttcttaagcaggtcttcgccgatttctactacatttccggcacccattgttatcaacaggtcaccgtttacacaattttctgataaaaatttctcgatttcctcaaatgatgggaaatagtgcgcattcacacctttttcgagcaataaatccaggatatccttagatgagataccatatgtgttctgctcacgcgcagcatagatatcagcaagcaccacaacatctgccattgaaagaacatcggcaaaatcatttaagaatgccttggttctggaataggtgtgtggctggaagcaaaggacaagcctgtcatgtggatatttttgtgcggctgtcagtgttgcgcggatctcggttggatggtgagcgtagtcatcaatgattgtgacgccgtttaccttgcccttgtactggaaacgtctgtcagcaccgccaaatttgtcaaggcctgtgaggatagactccgtatcaagaccgagtgtggtggataaagctatggctgcgagcgcattgcttacattgtgagcgcccggaacagagagttttacgtcgaaaagtggactaccctgtctcatagctgtaaaagatgcacaagctttatcgtcataggttatattttccggatagaaatcatattttgaatcaaagccataggtgataatcttctgaggaagccctgcgacaatctcctcatagcggtcaatctcaccattgatgatggtagcaccgcctgcgagagtgtttgatgcatactcgcggaaggaatgcctgatgtcgttgatatccttgaagaaatccagatgctcagcctcaatatttaaaataatactgtagcgtggtctgaaattcaaaaagctgtttgtgtactcacatgcctcagagatgaagtactctgaatcgcccacacgcagattgccgtggatagatgacaaaataccacctacggaaatggtaggatctgtctgggcggcgagaagaatctcgctgatcatggatgtggtggtagtcttgccgtgtgtgccggctacagcgatggaataatcgtaattgtccataatctgtccgagaagctcggctctggtaagcattggaataccggctgcctttgctgcggcaaactcaggattgctttcgtggatagcagcagtgtaaaccaccaggtcgataccggatgtgatattgtctgcgctctggccatatatgacttttatgcccttggcagcaagagtttttgtgaggtctgattcctttgaatcggagccggaaattgtaaagccctcctcatgcagaatctctgcgagaccgctcatgctgataccgccgatgcctatgaaatggatgtgtattggtttactgaaatctattttatacattaattttacctgcctgatttattataatttatattgtaactattaagaaacactgagaacaaaaagccgatgcgtcatgattgcatgtaagcaacagattttcttgttctgaatagttactttatattaattatacaactaaatatagtatttgcaaaggaaaaataaggtgaaagcaggcatgactttcaaatgataagaaccatagcaggttaaacagatatacgctaaatgacacttgtgcaaaatgtcgaaaataaagaaaaatattatatgattttgtgaaaaatgttgaagtgataatgcggctgtggtataattttttttataaaaataattcatccggaccatatgaatttgatgggtttaaagtatatagcggtaactgcaatttatgcagcagcaactataatttatatggaaacaattgtgatttattatggaagcattacagatacggttattacagaaacaagtggtggggaccgggtggcacaacaaaaattaggacagacgaggagtgataacgtgattaagaaagaaatgatagccatgcttttagcaggcggtcaaggcagcagacttggtgttctgacagcgaacgtagcaaaaccggcagtttcgtttggtggaaagtacagaatcatagattttccgcttagcaactgcatcaattcaggcattgatacagtgggtgtacttacacagtatcagccactcagacttaacagccacatcggaataggtattccgtgggatctcgacaggaataatggaggagtggcaatactgcctccttatgagaagagcggcaacagcgagtggtacacaggtacagccaatgcaatctaccagaatatgaggtatatagacagttacaacccggactatgtgttgatactgtcaggagaccatatttacaagatggactatgaggtgatgcttgatttccacaaggaaaacaatgccgatgtgaccatagcaaccatgccggtgcctatcgaggaggccagccgatttggtatcgtcatagccgatgatgataagcgcatcaatgcatttgaggaaaagccggttcatccgcgcagtaatctcgcatcaatgggcatttacatattctcatggccggtgctaaaggaagcattacttgcactaaaggatcaggaaaactgtgattttggcaagcatgtcataccatactgctttgaaaacgacagacgtatgtttgcatacgagttcaacggatactggaaggacgtaggtacactgggctcatactgggaggccaatatggagcttgtggacctcattccggagtttaatctgtacgaggagtattggaagatttacacaaagaatgatgcaatcgagccactttatatagccaaaggaggtcatgtggagcgaagcatcatgggtgagggctgtgaatgctatggtcatgtggagcattctgttataggtgccaacgtcaagattggaagaggcgcagtaatacgtgattccatcatcatgtgtgacacggagataggctccaatgtcacgatagacaagtccatcattgccgaaaattgcaaggtgggcgacaatgtgacacttggcttcggacaggagaagccgaacgtattgaatgagagcatatactcatttgggctggtcactataggagaagattctgtgataccggacggggtaaagataggcaaaaatacagcaatctccggtgttacatacgaagaggattacaaagacggtgtgcttgagggcggagaagttattatcaaggcaggtgacggaaaatgaaggcaataggaataattttggccggcggcaacaataataggatgaaggaactgacagcaaaacgagcagtaccggccctgccggtagcaggcagcttcagaagcatagattttgcgctcagtagcatgtcaaactcacatatacagactgtcgcagtactgacccagtacaatgcacgctcactgaatgagcatttaagctcatcaaaatggtggaattttggcagaaagcaggggggcttattcctctttacacctacagtcacagcggacaacagtgactggtataggggcacggcagatgcgatgtatcagaacattgattttctcaagagacgccatgagccatatgtcatcatcagcagcggtgactgtgtatacaagctggatttcaacagagtgcttgattttcacatcgagaaaaaatcagacattacagtggtatgcaaggacatgatgtacaacgacgatgtcagccgttttggtgtggtacgcatggatgatgagtcaagaatcacagagtttgatgaaaagccaatcgaggccttatccaacaccatttccacaggtatctatgtcatcaggagacgacagctcatagagcttttggaggcggcagctgaggaaaacagattcgatttcgtaaatgatatcctcgtgcgctacaaaaatgtaaagaaaatatatggctacaagataaattcatactggaacaatatcgccgatattgatgcatacttcaagaccaatatggatttcttaagacctgacgtcagaagctatttcttcagggaggagccgaccatctgctcaaaggtggacgacctgccaccggccaagtttaatccgggctcagacatttcaaacagcctcgtatcaagtggctgtatcataaacggaagcgtggaggattcggtgcttttcaagcaggtatttgtgggcaaaaacaccacagtgaagaactgcgtgatactcaatgacgtctacataggcgacaatgtgcacctcgaaaattgcatcgtagagagccgtggaaccatcaatccaaacacctgctattgtggtgaggatggagtcatgatagtaaaagaaaaaaatgtaagatatgtaatttaaaaacagaccagggggacaaaaatatgcagattacagacatcagaattcgtaaggtagaaaaagagggcaagatgaaggcggttgtgtcaatcacaatcgatgatgaattcgtggtacatgacatcaaggtaatcgaaggagaaaagggacttttcatcgccatgccaagccgcaaggcaaacgatggcgagtacagggatatagcccatccgattaactctgccacacgcgagaatatccagaatatgattcttgaaaagtataagacagagattgagaatgtataaaacagtcaaatgttgtagcaaatgtaaataataattttggtatgtgtatatcagacgaaatcgcgcaagtgcatcgaaggaaattggcttgcgcggtttttgtgtaataagggtttgattagagaataaaaagtaagcatatattcattttagaccctcgtcttttagagagaaatttgatgacaaactgtcctctctgtgctacaatcaactcaaagcattatatttctgtaaatacgacaccacagcatattttatcggtgcgtatcactttgaagagggcagaccacttcgcatttttcgacaaagacatggaaattttcaatgctttatgttaccagttaatagcaggaaaattgaaatgtcagatgtgaaaacattgcgagaaaagcgggttgtggggattttgccggcttttatataagtgattattgtacacattatatacgtggaatgcataagtatacagtatttttattcgacttcagattttcctgctcacacaagaagaggaggttaatttgggtacaaaggactcgaaggcaaaggagtatttgtcggacaatacgaggtttagtgaaatctgtaattatgtattgtttgacggagagaaggttatcaaaccggaggatttaaaggaatgtgacaccacagaggtgttatcagttttcggtattgataagaagcagattgttaagcagaaatggagagatttgctaaaaagtgtttccgtgaagcatacagggcaaatgtatgttatcttaattggagcagaagcgcagacagacattcattatgcgatgcctgttaaaactatgatttatgatgcattgaattacggagaacaggtcaacgaggcaaagaaaagtcaccggaaaaataaggattacaggtcttcggacgagtttctgtcaggctttacacttgatgataagctgacaccggtgattacaatcacactgtatcttggaactacacagtgggatgggccaagaagccttgcagagatgatgccacagatggatgaaagaatactcccattcatcaatgattacaggattaatttattgaatccactggaaattacagatttttccaagttcgagacagggctcaggccattgtttgagttgttgaaaaatgcgtcagatgaggaaaagctgaatgagttaattacaaaagatgatacctttacaagggttgacgttgagacagtagcagctatcaatctatttgtaggaactgacattaagtatgatgaaaaggaagaggtggtaaatatgtgtaaggcatgggatgatcataaaaagcttggcattcaggagggcatgcagagaggaatgcaacagggaatgcagcagggccgtctttttgaaatttatctttcagtacaggagggagactattctgcaaaaagaggtgccgagaaagcagagatgtcgcttgatgaatttgaaaaagcgatgagcaaagcaggatataaaatacctgagctggtataataatctaaatatatttcacacaaaccggtctatccgtggtacaataagccacagaaagaccggctttttagagtatagctacaataaaagaggatagacaaacgatatgtacaagacgaaaatagataatctggatttaaaacagattgctgacagtggtcagtgcttcagatggaagaatacaggagaaaatgaatacacagtagtggcatttgacagggcgcttcggattaggcaagatgggaatgagtttgagctggactgtgatgaggcagactggaacaatatatggaaaagctatctggatatggatacggattatgcagggattgcaaagcttatagcagacggagatgacgcgcatctgaaggaggcatatgcatatggcagtggtgtgcgcattttaaggcaggatttgtgggagatgattgttacttttatgatttcccagaataataacataaagcgaatcacaaacagtgtggatttactttgcaggcggtgcggacataaaatagacggcagcgcagagggggaagaactgtatacatttcccaagcctcttgaggtaccggatgaggtgtttgatgacaggagcatgggctttggctatagggcaccgtatctgaaggaaatatatgagtatggcgctaataatcctgactggcttgataatctgcgcaaaatgagctatgatgaggcgatggaaagcctgcttactcgcaaaggaattggcaaaaaggtggcgaactgcatatgtctttttggtttacatcatgtggatgcgtttccgatagatacgcatgtaaagcagcttttggacaaatattatagtgacggctttgattttgaacgctacaagggtgtggcgggaattatccagcagtatttgttttattttgaattgtaaatgatatgagaaagagaaaggataaacgatgtacgttatagtaggacttggaaatcctgacaaaaaatatgagcacacaaggcacaatatcggatttgatgtgatagatgcgcttgcggataaatataatataagtgtgacagacaaaaagcacaaggcgctctgtggaagcggagtgattgagggcatgaaggtgctgcttgtgaagccgcagacatacatgaacttaagcggtgagtctgttgctgaggtgatgaatttttataagcttgatccggatgaggaaatgattgttatttttgatgatatttcgcttgagccggggcgtatccgtatccgcaaaaagggcagcgccggcggtcacaatgggattaagagcatcattgcaatgaccggcacacagggcttcagccgtatcaaggtcggtgttggagagaagccgcagggctgggatcttgctgaccatgtgctcgggcgtttcagttctgaggacagggcaaaggtagaggaagctataggtcatgcgatggatgcagcagttcttatgatgcagggcgagacggataaggctatgaacatatataactagctggaaatcgacaaggtgattttgaacagacagaaatggagaattgaaagtgaaagcatttacagagccactcctttcccttgcgggctttgaggagatgacaaaaacggcagaaaaatcgtccggacttatatctgtcacgggatgtatagatgcgcaaaaatcacagatgatatatgcctttggaggtcacaggaaaaacaagcttattgtgacctttggagagcagaaggcgaaggaactgtacgatgagtacagtttttttgacaaagaggtggtgtattatccatcaaaggatgtgcttttttaccagtcggatatcaggggcaatctcctgacagcggagcgcatcagggttttgaaggctatccgtgagcaggagagagtgacacttgtgaccacctttgatgcgctgatgaatacgatggcgccgatagaaaagatgtgggaaaacgtgcttacacttgagcagggacagcttttggatttgaaggaaattcaggctgctcttatcagaatgggctatgaaaaagagtatcaggtccagacgatgggacagttttctgtcaggggcggtattcttgatgtttttccgttgacggaggagaatcctatccgaatcgagctgtggggagacgagatagacaccatcagatattttgactgcgagagccaaaaatccattgaaaatattgaccgggtgagcatatatccggcggcagagcttgtacttagcgatgaggaaaaggccgggggaattgaaaagcttaaggcagaggcaaagagggtgtctgacaagcttagaaagcagatgaagacagaggaagcacacagagtgactgtgatggcagacgagcttaccgaggagtggggagagctgtccatgtatgcgggcatggatgcttttttgtcgtacttttttgacgagagagtcgggcttttggattattttaagccatcggacagccttatattcttcgatgagctgaccagatgcgcagagcagggaaagcttacagagaccgagttttctgagagcatgaagcagagacttgcgatgggatatatacttccggggcagatgaacggtctttttacagagaaggagatagtggcaaagctcgagaagtattcgtgcatcgcactcggtgcgctcgataataaagcaaacggactgcaccagctgggaagctatggtattcactgtcagagtgtcagcccatacaataacagctttgagcttttgataaaggacttaaagcgctataagaaaaacggctacagagtcattcttttatccggttcaaggacaagggcgaagcggctttcagaggatatcacagatcagggaatcacatgcttttacactgaaaactacgaccatgagcttttggaggggcagattatggtctgctacggcaaggtgagaagaggctttgagtatcctatcctaaagtttgctgtgattacggagtcggatatttttggggcgcagcagaagaaaaagaagcgtcaccgcacctatgagggtgaaaaaatacagagctttaccgatttgtcggttggggactatgtagtgcatgaaaaccacggactaggtatttaccgcggcattgaaaagcttgaggtggacaaaaaggtaaaagactacatcaagatagagtatcagggtggctccaatctctatattcttgccacccagcttgatatgatacaaaaatatgccggaaaggatgccagaaaaccgaagctcaacaagcttggaggtcaggaatggaccagaacaaagaatagggtcagaggtgcggtaaagcagattgcaggagacctggtgaagctgtacgcccagcgtgagcagcaaaacggatatgccttcggcgaggatacggtatggcagagagagtttgaggagctttttccttttgatgagactgaggatcagattcttgcaattgaagccacaaagactgatatgcagagccataaaataatggatagactgatttgcggtgatgtgggctacggcaagacggaggttgcaatccgtgcggccttcaaggcggtgcaggacagcaagcaggtggcatatcttgctccgacaactattcttgcgcagcagatttacgatacgttttcgcagaggatgaaggattttccggtgaatgtggatttgatgtgccgtttcagaagcgcagcagagcagaaaaagacgatagaaaagcttaaaaagggtgaggttgatatcatcatcggaacacaccgtatactctcaaaggatgtgcagtttaaggatctgggacttttggtaatcgatgaggagcagcgcttcggagtgactcacaaggagaaaattaagcagatgaaggtcaatgtggatgtgctcacactgactgctacaccgattccgaggacactccacatgagcttaatcggcataagggatatgagtgtgcttgaggagccgccgatggaccgtgtaccgattcagacatatgtcatggagtacaatgatgagcttgtcagagaggcaattaacagggagcttgccagaaacggacaggtgtactatgtgtacaataaagtgcgcgacatagcagacataacagcaaagctgcaggagctggtgccggatgcgactgttgcatttgcgcacggacagatgaaggagacggagcttgagcgcatcatgtaccgtttcatcaatggtgaaatagatgtgcttgtatccacgactattatagagaccggacttgatatctcaaacgtcaatacaatgattatacacgatgcggacaacatgggactttcacagctttatcagctccgcggacgagtcggcagatctaaccgtactgcgtatgcatttctcatgtacaggcgcaacaagatgctaaaagaggtggcagaaaagcgtcttgcagcgataaaggagtactcagaccttggcagcggctttaagattgccatgagagaccttgaaatccgtggtgcgggcaatctgctcggtgcggagcagagcggacacatggaggcagtgggctatgatttgtactgcaagatgttgagcgaggctgtaaaagaggcaaagggcatcgaggatatcagtgataaatttgatacgaccgtggatattgttaccgatgcttatattccggcaggttatattgcaaacgaattccagaagctggatatatacaagcgtattgcaggcatagagacagaggaagagaaggatgagatgctcgaggagctcatagacaggtttggcgaacctccaaaatcagtgctcagcctgcttcgcgtggcaaggcttaaggcgctggcacatgccgtatatatcactgagataaagcagaccggctcattgataaagcttaccatgtttgaacgggcaaggataaatccggagaagataccggagcttgttgcccagtataaatcctccctcaaattcaatatggcagaaaacccatatttcacatttgatttaaaaaatggcagcgtggcaaagaagcgggatgtgcttgatgtggtggaggaactgatttcgcaaatgcgtaaggaactgattacggctgaatagttacccgaattttcgaatcatgtagcatatagcataggaaacaccacatgctttacgcgaaattgacgataatttacaaagtttagaaaatgcttgccagcaggcccgaaaagctctataatatacgagcgatactataccaattttaaagaggatagatacaatgaaagcgaaaaaagtaatagctatgttattagctgcaacactctcagttacagcttttacaggatgtgcattaaataaaaccgcaacagttgcgacattagataaagaggatatcaagcttgggcttgttaattttatgataaggtaccaggaggccggttatgatgacatgtatatacagtacatgggcgagggctactgggacaagacagtatcaggcaataatactgtgcttgaaacatggaagaaaaatgctatcgaggaggctcatgagctttacacattaaaggcgcatcagtcagattacgatgtagaggtttctgatgatgagaaaaaggaaatcaaaaaggccgcagagaagtttatgaaggcaaattccgatgatgtgatagacgagatgagtgctacagaggagattgtcgaggaatatttagagcttcgcctcataaagagtaagatgtatgctgcaatcatcaaaaatgctgattcaagcgtgacggatgaggaagccaatatggctgcatacaccattgtgaagcttgattacaagggtgcatatgactctaattaccagtatcagacatatacagatgagcagtcagcacagataaaggcacaggcagatgcagtggtagaggcgcttgcaggaggatcatccttagaggatgcagccaaggcagcaggcactacagccacaacaggcacatacgccacatacgttgatccggatgcggagaagacagatgattcagataagaaatcagatgacacagagtctacagagagctcagagtcatcggacagcaagacaaaggacagtgtatacactacaaacaatcttgatcagagcgttgtagatgcactcaattccctccaggagggacagacctcagacctcatcaccacagacagcacttactatatcgtaaggctcgacaaaaagaccgatgagaaagcaacagagtcaaacaggaagactgtaaagggcaataaagaggacaaatattacaatggcatcctttcaggatggcaggatgatgaaaaatggtctgtaaagcagaagcagcttgacaagatcaagattcacaattattttactactaccaagaaggacaaaaaggcagcagacacaagtgctacagagagcacacagcagtcagaaagcactaatagtacagatacagagaatactgaggcagtagatggaacagaaaactaatatcgtacttataggcatgccgggagttggaaagagtaccataggcgtaatacttgcaaaggtgctgggatacagcttcctggatgcggatttactgatacaggagcaggagggaaagcttctgcgtgagataattgaggaaaagggcacggacggttttatagaggtagagaaccgtgtcaatgcctctatcagggctgatagggccattatagctacaggcggttcggtggtatacggaaaagaggccatggagcatcttaaggagataggcagagttgtgtatctcaaggtttcttatgctattttggaaaaacgacttgcagacataaagggtagaggtgtagtattaaagaaagggcagactttagaaaccctttttgaagagcgctcaaaattgtatgagcagtatgcagacatcgaggtttccgaggaggggcttgatgtggagcagacagtagagaagctggtggaggcacttgaattatagtgcttatttatcgtgatatgattagataatagtagctgctgcgtcatttattaaaagcagcaccggcacaaatggcggcttaaatacgtcgtcataaatgaaatttgtagttggatgtataacaatagtgtaaattgagaatagtatattaggaggaagtatactcctgaattcatagaggtggaatatggaacagtacgtaatcaaaggtggaaatcctttatacggtgaagttgaaattggtggagctaaaaatgctgcacttgctattttggccgctgccataatgacagacgagactgtaacaatagataatttgccaaatgtaagggatatcaatgtcttacttcaggcaatcgaagaaatcggcgcacatgtggagcgcgtggatatacacaaggtaaagataaacggttcatttatcaggggcgtaaatgtcgataatgaattcatcagacgaatcagggcatcatattatttgattggtgcattacttggaaaatacaagcatgcagaggttgcgcttccgggaggctgtgatatcggaagcaggccgattgaccttcatatgaagggcttccgctccatgggagcagacatagacatagctcatggccttgtcatcgccagggcaaaggagcttaagggcacacacatatatatggataaggtttctgtaggtgccacaatcaatattatgatggctgcagccatggcagatggcaagactgttatcgagaatgcggctaaggagcctcatgtcgttgatgtggcaaacttcttaaacagcatgggagcgaatatcaggggcgcaggaaccgatgtcatcagaattgtaggtgtggagaaattacatgctacagagtattctgtcattccggatcagattgaggccggtacattcatgtttgcagttgcggcagcgggaggcaacgtgctggtaaagaatgtcattccaaagcatcttgaggccaccacagcaaagctgttggaggtaggctgccaggtagaggagtttgatgactcagtcagagtaatatcagatggacatttaaagcatacacaggtcaccacacttccatatccgggcttcccgacagatatgcagccacagatggcggtgcttttgggtatcgctgagggcaccagtacagtgacagagagcatatttgagaatcgtttcaagtatgttgacgagctcaccagaatgggagctgatataaaggtagagagcaatatagcaatcatcagcggcgtgaaaagatacacaggtgccagagtgaatgcacctgacctaagagcaggagctgcactggttatagcaggtcttgcagcagagggcatcacagtggttgatgatatctactatatccagagaggctatgaggcactcgaggagaagcttacaaagattggcgcaaagattgccagggtagaggatgagaaggagcttcagaagttcatactcaaggtatcgtaatagatatatacgtaaagcatgaaatgtaaacacaatataaatgcaatatataaaataagaaccggcagcatcttactgtagatgcacggttcttatttttggttattttataatttttttgagtaactattccgtaacccttttgattataaatcggcttacatcacagatttgatgaaaaactcgcggtttgtggacaaatcaagtatactgccgtcatcaaaacgtacaatagggcgtgacagttcatgtgggttgagcatcacaatattacagaaccggctgtcgttgagcattacacggttgctctggtatgtggtagcaagctttttcaaaaacaaaagcaggaactttgtattgtactttgtaaaaccttcactctcaaagcttgatatgacagcgaacggacaaagtggtgcgcgatagcgtctggcagcagtcatggcatcatatacatcggcgatggctgttatcatggcaaagtcgtcaatcagtgagctgtcaagctgtgaaggatagcctgagccatcacagcgctcatgatgcatgagggctgtgcgctttattctggagtcaatctgcagatccctaatcaaatcaaaaccaaactgtgggtgcttttttatgagcgcaaattcttcatctgtgagcttgtcaggcttgtttagcacatcatcgggaatcttgcatttaccgatatcgtgaagtactcctgcgatagtaagcgtattcacatctgtcttttccatatgaagccatcgtccgatcatccttgtaataagccctacattcagacagtgtgagtacaacgggtctgcaatggtgcgcatgttgtagagcatgtcaaaggtctcgattgtagtgccgcacgatgaggaaaggtcaatgacagcagtaagaagcgcagcctcatcaaaggatttttcgccggcacagattttgccaaaggtatccttgatttgatttatgcatgtgaggtatttgagctggaagcctcggaactcttctgaggcctgaacacgctggatgttggtcaccatctcatgtgcgcgggttttgggtacaggttttaccttgtctcgctttgctgtattttcgccggcttgcggtgctgttgcatcgaatgggttttgaattgagatgctgcctaccttatatagcttcattttgttgatgagctgacgggtgagtggtgtgccgggcagtgcaagtatctgccccagaggggtctttatcggttctgctgccaccataccaatctgcgcatcttttatgctgattttaatcatgagttactccaaaaatttattttgatattgtgtgtttagtactataaatacaaatttaagtataattacaaaaattatgaaagtcaataaaggaagaaagaataattacataaaatagcttataaataatgaatagggtatcgaaaatggattattgataaatctgtatcgaaaatgatacttgacatatatatcatgtggtagtaatatagctgacagagatttgaaaaattctatattgtaacttctcttattcagagtgatggagatacaaaggatctatgaagtcacggcaaccccgttagaaaacaggaaggtgccaacctgagcgagtaatcgaacaataagaggatttttattatcttaattttaatccacttatttgcagtaagtggttttttattggaaaaatattggtcacacagtatgaaaggagcaacagataattaatggaaaaattattatttacatcagaatcagtaactgagggacatccggataagctttgcgatgcagtatcagatgccatccttgatgcatgcatacagcaggacccgatgagccgtgtcgcatgtgagacagcaagctgtacaggcttcatccttgtaacaggagagattaccacaaaggcacagcttgatattcctgcaatcgtcagaaaaacagcacttgagatcggatatgatgacggaaagaagggactcgacggaaactcatgtgcagtaatggtttcaatcgacaagcagtctgctgatatcgccatgggagttgacaaggcactcgaggcaaaagcgggcgaccttacagacaacctcgacaccggagccggagatcagggaatgatgtttggatatgctacaaatgagactgaggagtatatgccatacccaatcgcactcgctcacaagcttgcattccagctcacaaaggttagaaaagacggcacacttacataccttcgtccggacggaaagacacaggtttcagtagagtatgatgaggcaggaaagccggtaagacttgaggcagttgtactttcaacacagcacgacgaggatgttacccaggagcagatccatgaggacatcaagaaatatgtatttgatccaattcttccaaaggatatgattgacgatgagacaaagttctttatcaatcctacaggacgtttcgtaataggtggaccacacggagatgcaggtctcaccggtcgtaagattattgtagacacctacggtggatatgcacgtcacggcggcggagctttctcaggaaaggactgtacaaaggtagaccgttcagcagcatatgcagcacgttacgtagcaaagaaccttgtagcagcaggatttgctgacaggtgtgagattcagctttcatatgctatcggtgttgcacagccaacatctatcatggttgatacatttggcacaggaaagcttgcagatgacagaatcgttgaaatcgtaagggagaatttcgaccttcgtccggccggaatcatcaagatgcttgacctcagaagacctatctaccgccagacagcagcatacggacacttcggacgtacagatatcaagctgccttgggaggcacttgataaggttgaggacctcaagaaatatctctaaacaatatgtggggcttcgcgccttttaggttgtgagcgccggatagtatacattatatttcttagaaaaagttagaaagaatttagagaaaatttagacagaagttaccggatatatgatataattaagtcatgggactgacattgagtcggtttccatggctttttattttcaggaggaacggatatgagcagaattttgatagtagaggacgaggttgcaattgctgatcttgagaaggattacctggagctgagcggctttgaggtagaggtggagaatgatggcacaagcggtctcgcaagggcattggcggaggattttgatttgtttattcttgaccttatgctgcctggcattgatggctttgagatttgcaaacagattcgtgagaaaaagaacacaccgatactcatggtttcagccaagaaggatgacatagacaagataagaggactcggactcggtgcagatgattatgtcacaaagccgttttctccatcagagcttgttgccagggtaaaggctcatctggccagatatgagcgcttgattggaagcgctacacctgaaaatgatatcgttgagattcgtggtatcaagattgacaaaacagcccgccgtgtgtgggtaaacggagaggaaaagcagtttaccacaaaggaatttgacctgctcacattccttgctgagaatccaaaccatgtatttaccaaggaggagctcttcaaggaaatctggaatatggattcagtaggagatatcgcgacagtcactgtacatatcaagaagattcgtgagaaaatcgagatgaacactgcaaagccacagtatattgagactatttggggcgtgggataccgttttaagctgtagtgatttttaaaaaatatagtagatattgtagtattaataggacatatcaaattcaaatgcgaaaggatatgtccttgttgtatatataaagtggcttattaatttattcaaatggagaatactatgaagataaaaacaaaacttgctatatcattctgcataattatttttgtgcctgttgtgctcaccagtatagtgcttgtgggcttcaataagattcagctaaaggccataaacaagacatatggcatggaggatgcgggcatgctcgcgctcactgacacagtacagtttctgaacaaggtgacagggcgcacatatgatgagctcgagaagacatcgctcatagaaccatccaggcttcttgatagtgattatctgactaagataaataagaagctggagaagaagtattcatatctcatagtgaaaagtgaaggagagctcattttcaatggtggaattgataatgatgatattttgagaaagcttccgcgaatatccaataagcagagcagctctgatgtgagcagctatatggacagtgatgacaaggtgctcataaagcagcttaattttcgtgacagtgatggtgacgaggcgagtctttacatagtgacatcaactgcgtgcgtgatccctgaggtcaggactgttttgatggagggagcatttgcactagtattgatacttcttactacggctgccatgcttatagtgtggatatacaggagtatcatcacaccgatagagaggctgcgtattgccgctgaaaatatcaaggatggtaatctggactttgagcttgagacgagcccgagcgacggagagattggcgagctgtgtactgcgtttgagcagatgcgtgcccgcctcaagaaaaatgccgaggaaaaggtgacgaatgagtctgaaaacagagtgttaatcagtaatatcgcacatgatttaaagactcctattacagcggtaaagggctacgccgagggcatacttgacggagtggcaaacacccctgaaaaggtagataaatacgtcaggaccatttacaataaggcaaacgatatggataagctcattaatgagctgacactttactcgaagattgatacgaacaggattccatacaattttgcgaagataaatgtcacagattattttaacgactgtgttgaggaaataggacttgatcttgaggcgaaaaatataaggctttcatatgagaatcacgtggatagcaacgtgcttatcattgctgatccggagcagattcgccgtgtgattaataatatagtcggcaattcggtgaagtatatgaacaagacacaaagctatatagatatcaggataaatgatgttggtgacttcatacaggttgaaatcgaggacaatggacgaggaatcaaccagagagatatgccatatatttttgacagattttacagagcggatgcgtcgagaaattcggctaccggaggcagcggcataggactttccatcgtaaagaagattatagaggatcacggcggcaagatatgggctaccagcaaagagggtgatggaactaccatgtttttcgtaatcagaaagtatcaggaaacacaggatatgaaccgacagtaaacaaataaacaggatattgacataaaaagtaaagctataattataacagttagatattagaatttaaaattaagagctcccgattgacaacgcaaatagtgttgtcagtcgggagctttaatgtattttttatttaaaataagttaaggaaaaatacataaaatatttgaaaaataaagtcggacgtagtaaaatagtaacattgcacgaaagaaccatggagaaatcgaaagggggacaaacatgcataaattcagacaaaaatatataggagacaaagcattttataagcgatatctcatgttggccataccaatgataatccagaatgcaatcacaaatctggtaagctttctggacaacattatggtaggacagcttggtacagagcagatgtcaggagtagcaatcgtaaaccagctcatatttgtgtacaatctggctgtatttggggcggtgtcagcggcaagtatattcggagcacagtattttggcaagggaaatcataaggggcatatgtattccttcagattcaagctgtatgcagcgctgcttgttacagcaatagcgatgacactgtttatcacgaacggaacaggtctcatatcactttatctgacagatacggcaggaaacggtgccacggaggtagcactggcatatggaaaggaatatctggaaattgttatgataggtctcataccgtttgcggtgacacaggcctatgcgacaaacataaaggaaacaggacagacttttgtaccgatggttgcaagctttgcagcagttggaagcaatgcggtgcttgattttctgcttatcttcggaataggaccgataccaaagctgggtgtggcgggagcagctattgccacggtgatgtcgcgatatattgagacaataatagttgtgctgtgggcgcataaaaacagggataagaacagatatctcgagggcgcttacagaggaataggaatgccgtttggtgagtttaagactatattcatcaagggactgccactcatgctcaatgagcttttttgggcagcaggcatgacaacggttacacagtgttattcagtacgaggactctcggtaatcgcaggtttaaacattgcgacaacgataacaaaccttttcaatatcgtgtttatacagcttggcgcatgcatcagcatagttgtggggcagtatcttggagccggtgagcttgaaaaggcaaaggatgcggataacaagatgatagtgttcagtgtgttctgctgttctgtaatggcggcggtcatgcttctggtaggcggatttttccctcagatatataacacaacagatgaaatcaagtcactcgcaaccagcttcatagcggtatcagcgataattatgccattttgtgcatttacacattcgtcgtatttcacactccgctcaggcggcaagacactggtcacatttctgtttgactccgtatttacgtgggtgatagtggtgccggtggcatttgtgctcgccaaatacacagcacttggcatagtagcggtgtacttcctcgtgcaggccacagagctgataaaggtagtcatcggatacttcatggtgaaaagcgacgtgtggctcgtgcagatggtataggaatgtaagtcattatcttgcggaaaagtaaaataaaagttatactgtagcaaaagtcagcataacagttctaacccagaatgaaacggagcataaaatgagcgaagaaaaacagcacaagcgccgcgtgcactatagcggaaaatatcccaaaaaatttgaggaaaaatacaaggaattaaacccggagaaatacaaggatacaattgagcatgtcatcagcaagggaaatacccctgcgggcatgcacatatccataatggtaaaagaaatcatagattttctggacataaagccgggacagacaggctttgatgccacactcggatacggtggccacacaagggcaatgcttgaaaagcttgaaggacagggacatatgtttgctacagatgttgacccaatcgagtctgaaaagacaaaaaagcgtctcgctgaagcaggctttggagaggatattctcaccataaagcttcaaaacttctgcacaatagatgagattgcaaaggaagtaggaggctttgatttcatacttgccgatctgggagtttcatcaatgcagatagataatcctgagcgtggtttttcgtttaaggtggatggaccgctggatctgcgtcttaatccaaatgccggtatcagtgcggcagagcggcttgataatatatcccgtgaggaactttcaggtatgctctatgagaactcagatgagccgtattgcgaggagcttgcaaaggctatcacagacgaaatcaggaaggggaaccgcatagatacgaccacaaagcttcgtcacattatagagcagacactcgattttctgcctgaaaaggataagaaggacataatcaaaaagacctgtcagcgcacattccaggcgctccgcatagatgtaaaccatgagtttgaggtgctatatgagtttatggaaaagcttccgggagcattaaagcccggtggaagaactgccatccttaccttccattcaggagaggacaagctggtcaaaaaggcactcaaggcaggatataaagcaggaatatacagcgactattccaaggatgtgattcgtccatcagcacaggaatgtgctcagaacggacgtgccaggtccacgaagatgcgctgggcggtccgtgcggaatagaaaagaataaaaatagttctaaaaacctattgctttattgagaaaaatagtctactatgaacgtgttatatgactgacggataagtggaataaccacatgaaatataacaaataagagccgaccgtctgggcgataaacccggacagccggctctttttgattataaaatcagctatagtcgtgtaaataactagggaatgtatctcaaaagaaacaacatggatattgacaaaaatactgtagtaagtatatactaaccacagttaaacaaaactaatcaaacgaagtaacattcacacattttaaggaggatattacaatgatagaaatgaaagagtgggatggatttgaaggacgtctttggaaagaggaaatcaacgtccgtcagtttattcaggacaactacactccatacgacggagacgagagctttttagctgatccgacagatgctacaaacaagctgtgggatgcgctccagaaattacagaaagaggagcgtgccaagggcggagttcttgacatggagacagaggttgtaacaggaatcacagcttacggccctggatatatagatgagtcattaaaggacctcgagcagattgtaggtcttcagacagataagccgttaaagagagcattcatgccttacggtggaatcaagatggcggtgcaggctgctgagacatatggttacaatgtaagcgacaagctcaaggagattttcacaaaatatcataagacacacaacacagcagtattcgatgcatacacacctgagatgatgaaggttcgtcatgcaaagatccttacaggtcttcctgacacatacggccgtggacgtatcgtgggcgattaccgtcgagtagcattatacggacttgattatctcatcgaggagaaaaagaaggataaggcaaactgtggctgtggacagatgacagatgatgttatccgtttaagagaggaaatcgcagagcagattaaatgtcttgaggatatgaagaagcttgcagagatttacggatatgatatctcaagacctgcaacaaacgcaaaagaggcagttcagtggttatacttcggataccttgcagcaatcaagacacagaatggcgcagcaatgtcagtaggacgtgtatctacattccttgatatttacatcaagagagatatggacaagggcatcctcacagagcaggaagcacaggagctcatcgaccattttacaatgaagcttcgtatggttaaatttgcacgtatcccttcatacaaccagttattctcaggtgatcctgtatgggcaacacttgacgtggcaggaacaggtgtggacggacgttcaatggttacaaagacagacttccgtttcctccatacattagagaacatgggacctgcaccggagccaaacctcacagtattctactcatcaaagcttcctcagaccttcaaggattatgcagcccgcatctcaattgagacaagctcaatccagtatgagaacgatgacgcaatgaagccggtatggggcgatgattatgcaatctgctgctgtgtatctgcaacacagacaggtaaagagatgcagttcttcggagcacgtgcaaaccttgcaaaatgtctcctttacgctatcaacggtggtgttgatgagaaatcaggtgagcaggtaggaccaaactacgcacctatcacagcagagtaccttgactatgacgaggtaatggcgaaatacgacaagatgatggactggttagtagacatctatgtaaatacattaaaccttatccagtacatgcatgacaaatactactatgaggcagcagagcttgcactcatggacacagacttaaagagaacatttgcaacaggaatcgcaggattctcacacgtaatcgattctctttcagcaatcaaatatgcaaaggtcaaagtagtacgtgacgagagcggactggcaaaggacttcgaaatcgagggagagttccctaaatatggaaacgatgatgaccgcgcggacgaaatcggggtatggcttcttaagacattcatggacaagttaaagaagcatcacacataccgtgattcagagcctacaacatcaatccttacaattacatcaaacgtagtatacggaaaagctacaggagcaatgcctgacggacgtaaagcaggagagccgctttcaccgggagcaaacccatcatacggcgcagagcagaacggacttctcgcatccttaaactcactcacaaagcttccatatgagtgggcgcttgatggaatctcaaatacacagaccatcaacccgggagcactcggaaacaacgagggagagagaattgacaaccttgtaaacgtaatggacggatacttcgaccagggtgcacatcacctcaatgtaaacgtattcggtaaagagaagctcatcgatgcaatggagcatcctgagaaggaggagtacgcaaacttcacaatccgagtatcaggatacgcagttaagttcatcgacctcacaagagagcagcagctcgatgtaatctcacgtacatgccacgagagaatgtaatataaaaaaatatccaacattccagaatgtgcaggccaagtgcctgcatattctgattttcaaataaactgcatatgtactaaataacaccacagcgtaaggaattttcggaaggtgtgtaaaagccggtcgcgtcaagcatagaaaaccaaaatcataattcatacagcctcttagcccgaagaacctgagcattgcaaagtcccggtcggcgggttgccgaaaattccgtaccataaaaataaaagtagcagcaacaacaacctaaaggaggaaaaacatgggagaaacactaggaagagtacactcggtagaaagcttcggttcagccgacggcccgggagtgagatatatagtatttttgaagggctgcaatatgcgctgtaaatactgccacaatccggatacatgggccaaatgcggcgaaaatgacggtgcaaagctgatgacaccgcaggaggtgctaaagaccgccatgcgctataaagcgtactggaagcaaacaggcggcattacagtaagcggaggtgaagcacttttgcagatagactttgtcacagagctatttaagcttgcaaaggaaaaaggtgtaaacacatgccttgacacatcaggaaatccatttaccgtggaagaaccgtttttcggcaaatttaatgagctgatgaaatatacagatctcttcatgctggacatcaagcatatagatgacgaggagcacaaaaagcttacgggacagacaaataagaatatccttgatatggcacaatatctctcaaaaaacggtaaaaaaatgtggatacgtcatgtgcttgtgcctggaatcaccacggatgagagatatttaaatcagcttagagagtttatcgacacacttaaaacagtggatagggttgaggtgctgccgtaccacacacttggcgtgtttaagtggaaggagcttggtataccataccagcttgagggggtggagcctcctacagaggaacagatagaatgtgcaaaaagaatattaaattgtcagaattagtttttaaataccattgctaacaactcattaagttgataaaatataataagtaactattattttacaccgatgctgccttcgtttgtatgtgaggtgacacttggctatatgcttgcgtatcgcaactgtaaatgtgctgaacagttaaaatttaaaataacaatttgcgggagttacaacatgggaaaaccagatatcatttacgaagacaacgacataatcgtctgctacaaaccggcgggaattgctacacagaccaggcgtatagggcagcaggatatggagagcttcataagaaattacagggcggctaaaaatgagccgccttatgtcggcatagtgcacaggctcgaccagccggtagagggagtgatggtatttgccaagaatcagaaagcagcggcttctttaagcagacaaataaaggagcatacaaccgagaaatattatcgtgcggcaagcagaggacagggagtgtcaggaacagcagtggaagatgaagaggcatggcatactctcacagattatatctccttcgacaagcttaccaatacatctaaaatcacaagcgaaaaagacaagctggcaaaaaaagcagtgcttcagtacaggataatatcaaatgaatgcaataaaacagaatttgacataaagcttctcaccggaaggcaccatcagatacgtttgcagcttgcaaatattggctatccactgataggagataccaagtatgggaagcctgcctcaaataactcaggaacgggaagcaaatccggacgcaccggtggcggtgtgagggagcagcttgcactttgctcctacaagcttgtttttgaccatcctgcgacaggggagaggatgacatttgaattaccatagtgctgttgggaataagatgaattaaagtgtatggtcttttttatatgaagaaaaatacagttgacaatattatttatattatctattataagttcataggttagttacttgagtggttaaccatgcaaccataccgcaaatatgagcgaaattagctgtgtagcagcgatgctaaacagagtgcagataaagtacaaatatcgtgcggttttgcgaatgtgtgtggtggttctggatagttacgataataaaaagtacaacaagtaggtaattgcggaacaagtgcgcactcctgattaaaaagcggtaagaattctgcaacggaataattaatgaagatgataacatacgttccggtcattccatggctgttcagggatatgccactatacaaagcaaaagctctggaaatcaactccatactttaatggtatttgatggttggaatgaatatgtacgatatttaaatttagattttggaaactggactgatttgcgaggtacaacttttaatggataaaaaaaagcgactacttattctaatatttgtattaatattaagcggaattgttgtgatattcatacataaaaatggttccatgaaaggagattctattatggaagaaaatgctatttccggagatgataatactcattggttccattcaaacggtatcatcacatccatagataactctcaaaaaaaaatctgtgttgatatcagtcaaaaaaataatttttttgatggtaccaatattacattaaattgcaacaaatcatctctcgacattacatatttagaggctggtcaagaaattactttctatttctttgagaataatgtacttgacactgaagttgcaatagagaaactaaatatcgttacaccataacctttagggattagatagtgttcatctaatcccttttattatgctatgacataatattggcacatctctgtgattgaagtgtaaatttacacatgctacaataagtattgcttatagttttctttattttcagcacctataaatggtgcttttttgtacccgtaattcattcaatcactgacaactggttctaagtattttatacgtacagcatacttaaccatataccaaacgtaaactgtacatacagccatacgtataacgttttctatttgtatagaaaagaggcggagcatgtgaatgaaattctgaatcaggagaaatcaatctatattcagataagcgaaatgatagaaaacgacatactgcgggatgtgcttttggaggatgagcgcgtgccgagcacaaacgagcttgcaaagctgtatgcgataaatccgtctacagcggcaaagggcataaatatacttgtggatgcaggaattttgtataagaaaagagggattggaatgtttgtgagtgacggagcaaaggaagtaataaggacaaagcggaaagcccgtttttgttgaagctgaacaatatgacgtagcgaaaaaataaaaactagaaaattttcgtctacatgacgaaaaacagtaaaatttttaatgtttatcgaaaaatattctatagtgattcccgaaatatttttgtatactagccttaccaacaaaacaaagggggacaaaaatatatgaagaaaaaatttgttgcaatcatgatggtagctgctatggcagcgtcaatggccgcttgtggatcagatgggggttcttctgatacacagaaagggggaagcagcacatcgacatctgatgttgcaaacaaggacaagccacttgtgtggttcaaccgtcagccatcaaacagctcaacaggagagcttgacatgacagcactcaactacaacaaggatacctattatgtaggtttcgatgctaatcagggagctgaacttcagggagaaatggtaaaagagtatatcgagaagaacatcgatacgatcgacagaaatggggatggcgtcatcggatatgtacttgcaatcggtgatatcggacacaacgattcaattgcaagaacaagaggtgttcgtaaagctcttggaacaggcgtagacaagagcggcgagattgacagtgctccagcaggaacaaactcagacggaaaagcagctgaggttcaggacggcaagattactgtaaacggcaaagactatgtagtaagagagcttgcttcacaggagatgaagaactcagcaggagctacatgggatgcagctacagcaggaaatgcaatcggaacatggtcatcatcatttggcgagtcaatcgacgtagttgtttctaacaacgatggaatgggaatgtcaatgttcaatgcatggtcaaaggacaacaaggttccaacattcggatacgatgccaacagtgatgcagtagcagctatcgcagagggctatggcggaacaatcagccagcatgctgacgttcaggcttacctcacacttcgtgtacttagaaacgcactcgatggtgtagatattgatacaggtatcggcacagaggatgatgcaggaaacgtattaagcgatgatgtatatgtttacaaggatgatgagagatcttactacgcattaaacgtagcagttacagcagataactacaaggatttcacagattcaacagttgtatgggcacctgtttcaacacagcttgattcagcaaagcaccctacaaagaaggtatggctgaatatctacaatgcttcagataacttcttaagctctacatatcagccactcttacagaagtatgatgatctcttaaatcttgatgttgagtacatcggtggtgatggacagacagagtctaatatcacaaacagacttggaaatccaagccagtacgatgcattcgcaatcaacatggttaagacagataatgcagcttcttatacagctcttttgaaccagtaaaagtatttaaagcacttagttggggagggaaaaatctctccccaaaataaagtgtatacagacgacagcaaatatagagttaggagcaggaagtatgggcgataagaataatgaaaacatcttatcgattcgtggcatgagcaagtcatttggacgaaacagggttcttgaccacatcaatttagatgtgaaaaaaggtactgtaatgggtctcatgggggagaacggagccggtaagtcgacaatgatgaaatgtctttttggtacataccagaaggacgagggaactatatatctggacggaaaagaggtaagcttttcgggtcctaaggatgcactggaaaatggaatagcgatggtgcatcaggagttgaaccagtgtcttgagagaaatgtcgtagacaatctgtttctcggaagatatccggtcaattcatttggtatgattgatgagggacgcatgaaaaaagaagcgtctgaattattcagaaagctgggaatgacagttaatctcgagcagccgatgaaaaatatgtcagtatcacagcgacagatgtgtgagattgcaaaggcaatatcatacaactcaaaggttatagtattggatgagcctacatcatcacttacggtacaggaggttgaaaagctgttccagatgatgaggatgcttcgtgaccagggtatttcacttatctatatttctcacaagatggatgagatttttgagatatgtgatgagatttcagttcttagagatggaaatctggtcatgacaaagagcacaaaagaaacaaatatgaatgaactgattgcagcgatggttggacgagtactggagaacagattccctccggtagacaacaaaccaaaggatgtaatcttgtcaatacagcatctttcgacaaagtacgagccacatctgcaggacatcacatttgatgtgcatgagggggagatatttggactatacggacttgtcggagcaggtcgtacagagcttcttgagacgattttcggaatcaggacaagagctgcgggacgagtatattttaagaaccagcttatgaatttcacctgtgcaaaggaggctatggactatggcttcgcacttatcacagaggaaagaaaagcaaatggacttttccttaagggaaacctcacctttaacacaacaatcgcaaatctcggtgcttataagaatggaccggcactttcagacagcaagatgacaaaggccacctctgatgagataaagattatgcacacaaagtgtatgggaccggaggatatgatttcggctctgtcaggaggaaaccagcagaaggttatctttggtaaatggcttgaaagaggaccgcagatattcatgatggatgagcctacaagaggcatcgatgtaggtgccaaatatgagatttacgagctgataatcaatatggcaaagcagggtaagacagtcattgtagtttcatctgagatgcctgagatccttggtataacaaatcgtatcggagtcatgtcaaacggacgactctcaggaattgtcaatacaaaggaaaccaatcaggaagaactgctgagactcagtgcaaagtacctataataaagggagaagacggatatggctaatagtaagattttaacggctgagcaggagcgtgctctgcgccagcctatcgacgaatatgttggtggaatacaaaaagaaattgatgcactcagaaaagacggaactacaaaggttgtagagtgtcagtcagcgatagcaggcatcaagagagataaaactctttcaaagggcgagaaagagtcagaaatagcagcctgcgagaaagagcttgcaaaggcaaaggctgttgaggcaaagaacaaggatgagatttcaaagctcattgccaaggctgaaagctatttaaaggaaaattttgattcaaagtattacaatgccgttaaggcaagctgtgaggcggaaaaggcagaggcgcttgctgctcataatgagagaatggcagagcttgataaaaagcacaaggctgctcttgcaaagacatcagacagtactgagataaaggaagaaaactacgtacacaagaatcgtatttccaatgagaagcttgagctcgagaaagagtatcagacgatcaaggacaaaaagcatgaggcatacagctacaagtatcacctgattgatatgcttcgtctttcaaagttcacatttatggagaaaagagctcagaaatgggagaattacaagtatacgttcaataggagaaacttcctgttacagaatggtctttatattgcaattatacttatattcatagcgctttgtgtcataacaccgataaagaagggcacacctcttctgacatacaacaacatactgaatattcttcagcaggcttcaccgagaatgttcttagcacttggtgttgcaggacttatcctcttaacaggaacggacctttctgttggacgaatggttggtatgggtatgacaacagccacaatcatcatgcatcagggtatcaatacaggctctgtattcggtcatatatttgactttacaggagtaccaacaggtgcaagagtggttatcgcattacttgcatgtatcgtgctttgtacattcttcacaagtattgcaggattttttacagcgaagtttaagatgcatccgtttatttcaaccatggccaacatgcttgttatcttcggtatcgtaacatatgctacaaagggagtttcattcggtgctattgagccggttatccctaacatgattattccaaaggtaaatggtttcccaaccatcatcatctgggcagtagcagcaatcgcaattgtatggtttatctggaacaagacaacatttggtaaaaacctctacgcagtaggaggaaacccggaggcagcagcagtttcaggtatctcagtatttgcagtaactctcggcgcattcgtgatggccggtatcctttatggatttggctcatggcttgagtgtgcaagaatggttggttcaggttcagcagcttatggacagggctgggacatggatgcaatcgcagcctgtgtagttggtggtgtatcattcacaggtggtatcggtaagatatcaggtgttgtaaccggtgtatgtatcttcacagcactcacatactctcttacaatccttggtattgatacaaaccttcagttcgtattctcaggaattatcattcttgtagcagttacacttgactgtctgaaatacgttcagaagaaataatatcgcaagaaaatttctttttcatacttccaaaatgatcagcagagatgtcagggtggcatctctgcttttttctttaacagttacacttttgtttatgtaaagctataaaagaatatatcagatgtggtataatactatacagacacattttaatatccgggggataaatttatgctacacacggattttatggtgtatgcagttcaataattacaagcagggagaagacataaaatgtatacattattactggttgatgacgaagaggatgtaatagaggtaatcgagagaaaggtatcctgggagcagattggttttcatgtggtaggacatgcgggaaatggcttcaaggcgcttgaaatgatggaggatatgcagccggatgttgtgatgactgacatacgtatgccttacatggacggacttgagctgtgcagtaacatcaggcagaggtttcctgcgacgaagctcttgctattcacaggatttgacgattttgagtatgcaaaggaggcagtacatctcgagatagaggagtatattttaaagccactcaatctggctgaaatcacggaggtattcaaaaagcttaagacaaagctggatgatgagctgaacgagaagaaaaacacagacatattgaagcagtattatgcagcatcactgcctgttttgcagtcaaacttttatacgacacttatcgagggacgcataccggaaaatgagctgggcaggtacatgagtgactataagattagccttgagggaccatattactgctgtattatcatacatacctccgcaagtcagatgccgcagggcatggatatcagactgcttgcagtgtcagtagagagacaggcacaggctgatttaaaggagcgctggaatggcaggatttttaactatctcggtgatacggtcatgatagcccagcttgtgcagcaggaggatatctctgagctgacagatgagtgtgacagattttgcaaatatgtaaatcatgtaatgggagcaaaggtaactgtcggaatcgggcaggtgtgtgaaggtatacaagagctggtgagctcttatcagagtgcgagggaggcagtatcctacagggtgctttatggcagcaacagggcaataaacatgacagaggttgagccacagcgacgtatatcaaaggatggcgatgagggaaatgagctgtcatatttatttaaaatgatttgtatcggcaagatagaggatgtgggacatgctgttgaagcgtatatgcagcacaattttatgtcgcagcagtcacttgagaactaccatgtggcagtaatggagctgatcagtgagctatatcacttcatgagcaataatgagctaaatgcgcaggaaatatctggaagtgtaggcaggctttataatgagctctccaattttgagccggtagtgctcaagcagtggcttttggatttttcaagcaggctgcatgatgatatggctgatgccagatacaactccaagaaatcactcatagacagtgcaaaggattatgtgcacaggaattacagaagtatggaccttggacttgacgatacatgtaaggagttaggagtatctaactcgtatttttcaagtctgttcaagaaggaaaccggcagctcgtttgtggagtatctgactgattacagaatggacaaggctgccagaatgcttgtggagacagacgacaagagctatgtcatagcccagaatgtaggctatgcggatccgaactatttcagttatgtttttaagagaaagtatggggtttccccatccaggtacaggacagagtatgagaagaataaggtataaaccaggcaatatacaatccataataatgctctcattctcactgctgtcgcttgcaataatgcttgtcacagttgtggtgatgtatataaaatttgccgatgcatcgcaggacagtatcatagagagcaatcataaggtgatggaccagacaatagacagtgtggaaagctatctggtcaatatgaggcaggtttcggatgcggcgtattattatgtaataaaggagaatgatattttaaagcagtctgacaccatacacgatggcatgagtctgctctatgaatcaaacaaggaatatctgcgcagtattgccatgtataatcagtatggaagccttatagctgcagagcctgtcgtgtcccagaaggaggacccggatgtgacaaaacaggactggttcatagaagctatggagcgcgtggaaaatatacatttttcaacacctcatgtacagaatttgtttgacgatggttccatgagatatcatctggtcatatcatcaagccgtgccgtggagctgacctccggttcagaatcacagatgggtgtgctgcttgtggacatggattattcgagtgtatcaaggatgcttgagaggataaatacatcgggaaaaggacagtattattatctgtgtgatgcaaatggcaatattatttaccatccgcatcagatacagtttgatggagatgttccggaaaacagtgaggttgcggcaaagtcgcaaaacagtatatatgatgattatctgaatggagtgcatcgtaagattatggtagatacaatcagctacacaggctggaagcttgtatgtgtgatgccatactccatctttaccaataagatggcggatgtgaagcagtttgtttttgttataatgattattatggctatgatgtttgtgtggataaacagagtgatagctatacgtatttcaaagccgataatgaagctggatgattctgtgaaaaggtatgagaatggcaatgaagcagatatttatgtaggtggttcctcagagatacggcatctgggatactctatacgtaattcatataagcagaacaatgagctcatgaaaaagatcgtatgggagcagaacgagagacgaaagagcgagcttgatgtgcttcaaagccagattaatccgcactttttgtataatactcttgactccatcacatggatgattgaaggaggcaaaaacgaggaggcctcgtttatgattacgcagcttgcaaagcttttccgtatcagtctgtcgaagggacataccataatacctgtacgcgatgagcttttgcacgcaaaaagctacatgaatattcagaaggtgcgctataagaacaaatttgaggtgagctttgaggtagacgaggaaataatggactactgtgcggtgaagctggtgcttcagccgattttggaaaacgcactaaattacggaatcagagagatggacgatttcggagagatagtagtcggaggccaaaaagtgggagaggatatcatcataacggtatcagacaacggaatgggcattccggagaatgaaattccgcttttgctgacaaatacggacagggttcacaagaagggctcgggagtggggcttgtcaatgtaaataacaggataaagatactgtttggagagcgctatggcctgcatatagaaagtgagcttgatgagggaacagttgtgacaatcaaaatcccggcaattgtctattcagaggaaaacagacttcaatttgaggagcatcatatagtatgaagcaagtacaattcccttgctgcatgggaggtgtgagagtgacagtgaaaaataaatggacaaatatgagcaagaataagagaaacttcatcataacagagctgctacttggagtactacttgtgataggaataggttttatcgcatacaataagctcaatgagaaaccggagcgtattgcagttgtgatggctgatgtggatgaaagccacagtgctgcgtttaaatatggcatgaaaatggcggcctctgagtatggtgtggatgtagttatgataagtaaggaaaatctgaacaatatgtcagatgaaattgatgtcataaagcaggagataaacaaaaaagctgatgcggtcgttttcaagccgacagcagaaaaaatgacagaagaaaaaagccttaatacacttatccggataaataaaaagacaccgataatggtagtcggagaccaggcgggaagcgagagctttaagtcgttaaatacagtggagtttgaccagtacagcatgggtgtggaactggcacaaaagcttcttgctgacaacaacggaacactttcaggtaaaaaaataggagtctattgtgaaaacactgaatccgatgcctgtaaaaaacgtattgagggcataaaggatactctcgcggagagcggctgtgttgtgatgtggattgtatcaggtgtttcggataccggggagaaaataaatctgcagtcacagagaaaggttgacatagttctttcaatagatgatgcaagtgtggttgaggcggcaaaggaagcctctgataataatctgcagggtgcactggtatatgggataggaaactcaacagaagccatatattatctcgattcgggctggacagaggctcttatcacacctgatgaatttgctgccggatacaaaagtgttgtaggactggtcgatatgctgcgtggcagtagaaaatattcagtagaggaaaagccggtatcttaccagcttcttaccagaaaaaatctgtttgatgaagaaaacaagaagcttttgtatgcaatcagccagtagtgggggaacaataaatgagaagcagaataagaaataccatgatgatactgtgttttgcactgatattgtcatttgtctcgtgcagcagcacaagagttgacgagaaaaaacagatatatataggcgtgacctgctatgaccagaaggatacatttatcggggagctgatagaaactttcaaaaaggagtgcgcaagtcttgatacagacaaatacgatatcagcatgacaatcatggatgctgcaggctcacagcgtgcacaggatgatcaggtgcaggagatgatagaggacggctgcaatgtgctgtgtattaatctggcagacagaacagatttgtcgcatattataaatgctgcaatggagaaggacatcccgattattttctttaacagggagccggttgatgaggatttaaatcgctgggataagctgtactatgtcggggccaaggcaaagcagtcaggtcagatgcagggggaactcatcgccgattatataaaaaataatccgggtgtggataaaaacggtgatggcaggatacagtacgtcatcctggagggagagatgggacatcaggatgccatcgtcaggacagagagtgtgacagagagtatgaagaataacggtcttcagatagaaaagctgagctgtcagatagcaaactggaatcgtgctcaggcgcagaaccgtatgacacagcttataggtcagtataaaaacagcatagagctggttattgcaaacaacgatgcaatggcactcggagcgatagacgcatacgaaaagcttggtgtgacggagtcgaatgtaccggcattttttggagtggacggcacagacgatgggcttgaagcagtgcagcagtcgaagcttgcggcaacggtctacaatgacaaggagggacaggcaagggctatggctcagcttgcttatctggcagccaccgggggcagcatgaaaaacataaagtttgaggataaaaagtatgtttatctgccgtatgagaaggtgacccatgacaatgtaaatgaatttgtgaaggatgaacagtgagcttatttatgctcgttcctccactccctcggagccactccgtagatatttttaaaggcgcgtgagaaatgaagctgattttcgtatccaacggcagaaccaacatctgcgatggataaggaggtcagctttaaaagctctgtggcctttatcatacgataattcatgagaaattcctgaggtgaatgtccaacggaatttttgaaaattttgcccagatagcttcggtttatgccgcagactccggcaatatcttcgattgagatatcattctgaaaattctgctcgatataattcatcgcttcttttatataaaaatcactcattttcccacctgaaacgagttttgatgatttggctgactgcatcagataatccagaaaaaggtacatatgcccaatcaggtgatacggtgattctgaggggtgccttgtgatgtagagcatttcctcaacaagtttttcgcggatatcctttgagtgtgtgtgatatacaggattatttttggtaagctctgttgtggtgagagcctccttgacgcgcagaccgtcaaactcaatccatatgtattcccaaggaagcttgtcatctgcgatataggtatttatctggccgggaaaaatcagaaagccctgcccgctttttatgttgtaggtttgtgtaatgccctttgcattatcggccatcagagtgccggtgccggacagtacatagtggaatagatagtggtttcttgtggcaggaccaaatgagtgtcccggttcgcactgctcgtggccgaactggtacatacacaaatctatgaaatttacatttggaaaaatattgaaggaaagtttgtccatgtgagtcactccttattgattaatactataaatatacccttatgcgacattatatgcaattatagcatattttatagcatattgatataaaaaagcaaaaataagggtatttattgtatgcataatggtatgttataatcagtttatcaggaaaaagagcaaataaaacagaaaaggagtgaaaaaatatggcaaaaagaaagatttgtcaggctatggcggttgtgctggcactcggaatgtgcactacaggactgaccggatgtggaaatgaaaagcgggcggacggaaaaactgagattgaggtggtttcttataagccggaggctgttaaggctttcgaaaagattgagaagcaatttaatgagactcacgatgatattcacctgactatatcatctccgaatgaggctatgactattttaaagacacgcttcatccgtgaggattatccggacatcattgcaataggtggagatatcaattattcaaatttcctggatgcagatttgtttgaggatatctcagatctggatgtagtggacactgtaaaagaggcatatctggatatggacaaggagcttgagttcattccaaaggatggcacatatgcacttccttacgccgcaaatgcagcaggagtactttacaacaaggatatgtttgcggagaatggctggaaggtgcctacaacctggagtgagtttacagcactgtgcgatgagataaaggaaagcggaacacttcctttgtatctgggctttaaggatacatggacatgtctggcaccgtggaatgctcttgcagtaggtctttgtgattcagacacctgtaatcaggtaaatatgggaaatacgacatttgaggaggcatattctccggttgccgacaagatacgcacattacttgattatgcagaggacaatccatatgcttacagctacaatgacgcatgtacagcctttgccagaggtgaatctgccatgtacacgataggaagctatgctattcctcagattaagtcggttaatcctgatatgaatatcggttcatttactttcccggcaaatgataatgaggctgacaatgtgttaaattcaggaatagatttacagttttcagttatgaaggcctgcaaaaataaggaagcagcatacgaggtgcttgaatatctgtacagcgatgagacaattcagacatatctggatgaccagggcggaattgcctgcaaggatggagatttcgcaataccggatacactgaaggatatgcaggagtatataaaggacaatcgtatgtcggattatcaggatcaccattatccaagtgagatgagcgtggatgccatgattcagacatatctgcttgacacaggcgacaatgcaaaggagaagttcttaaagaaatttgattcagactggaagcgttacaacagagatctgattcgtgaagtacaggattaccagaaggaacaggaggatgcaaaatgaaaaagaaaatgtcaaatagagacaagacattctgggcagttgtgatacctgttgtggttttatttttcgcattcaacacactgccgatgataaagggtgtgatttacagctttacaaactacaagggctatggctcatatgattatgtcggacttagaaactatacagacctgtttaccgacgccagagtcggaaagagctatctgtttacctttaaatatgcgattgcaggaaccatacttgtaaatgtattaagccttgtgatggcggttgcgctaaacagcaatatccgcggcaagagtgcattaagaggtgtttatttcgtaccgaatatccttggcggactggttattggttacattttcagctttatttttacatatattctgccggtagtaggaaataccttcaacatcggtttcttacaaaacagtattctggcgagtgaaaaatatgcatggattggcgtgctgattgtcggggtatggcaggcggttgccatgaataccatcatttatatatcaggactgcagacagtgcctgaggatgtttacgaagccagcatgctcgacggagcaggcaaatggaaacagttctggaaggttacatttccacttgttatgccgtttgttacaatcaatctggtgctcagcacaaagaacttcctcatggtatttgaccagattatgtcattgacaaagggcggcccggcgcagagcactgagtcaatctcatacctgatttacagaaatggtatggatggaggacagtttggctttcagagtgcaaacgcagtaattttctttgttgtaattgtggctatttcactattccagatgggcgttatgaataagaaggaggagcagttataatgaaaaaacaaaaaacaaactgggtacttaccatcgttttaatattgggaaccttaaccgtatttttcccgctgtatatggctgttatcatcgccttcaagaaaccgagtgagatgacaaatgatgtcgcaggagctctttcattcccttcaaagtggagcttttcaaacttcacagaggctatgaaggtgactgatttctggcattctctcggaaacagcttacttatcactattgtgaccattgttctcgcaatccttatccattcgattgcaggatatgttatcggacgaggcatggcaaggaaaaagagcttccgtttcatatatctttacattgtaagcggtatgtttgtgccattctcaattctcatgatgcctcttgtaaagcagactgcgcagatgggaattggaaacagggcaggagttatcattttatatcttgtattttacatgccaatgaatgtattattatatagtggatacttgaaaaatatccctatggcacttgaggaggctgcagacatcgatggcgcaagcacatggacaacatactggagagttgtatttcctatgatgaagcctatgcatgcgacagtagccatcctgacagcgctcggtacatggaatgatgtcatgacaccgcttgtaatcatgtcaggaacaggacagaatacactgccgttggcacagctgaatttccagacacagtttggaaccaactacaatctggcatttgcatcatatattctggctttgataccgatacttatattctatataatctgccagaagcagatattaaacggtgttgcaaacggtgcaatcaagggataatttttaaacactattttaacaataatatggggtgattctatggcaattatatttaatccaaacaagaaaatttttactttacagacagctcacaccacatatcagatgcaggtagacagacttggctatctgctgcatctgtactacggagcaaaaagcacaggcgatatggactatatgctgacatatgctgacagaggtttttcaggcaatccatacgcagcaggaatgaaccgtacatattcgcttgatacactgccacaggagtatccgactcttggaacaggtgatttcagaaatattgcgcttgatattaaaaacgaacagggtactgagagtgttgagcttctttataagagtcatgaaatcagagacggaaaatacgctctaaagggacttccggcagtgtgggcatctgatgatgaagcacagactcttgaaatagttcttggtgatgatatcgcaggcgttgaggtgcatctgctctatggcgtgcttgaggcttgtgatgtcatcacaagaagtgtgctcattaaaaatacaggcagtggaaatattacaattgaaaaggctcatgctgcctgcctggatatggtttacggagactatgatgtgatcagattctacggtaagcatgccatggagcgcaatcttgagcgcacacacttaggacacggcacactttcattcggaagccgcagaggaacctcaagccaccagtacaatccggcggttattcttgcacagcgcgatactacagaaaatgcaggagactgctatggtatgctttttgtatacagtggcaacttctcatgtgaggcagagaaggaccagattaaccagacgcgccttttaatggggctttccgatgaactgttttcatatccgcttgcggcaggagagacctttacagtgcctgaggtgattatgtcatactcggcagacggtttctcacagctttcacatcagtaccacacctgcatcagtgagcatgtgtgcaggagcagatttgcacatgaggtaagaccggtgctcatcaatagctgggaggctgcttactttgattttaccggtgatacgatagtagacctcgcaaaggaggccgcatcactgggcatagatatggtggtcatggatgacggctggtttggaaagagagatgatgataattcatcactcggtgactggtttgtgaatgagaaaaagcttggcggaacactttctgagctcatcgacagagtgcatgcgcagggagtgaagtttggaatatggattgagcctgagatggtaaatgaggacagtaatctgtacagagagcatcctgactgggctatccagattccgggaaagcttcctgtacgctcaagaaaccagcttcttttagacttttcgagaaaagaagtcagggacaatattttcgatcagatctgcgcagtgtttgaccagggaaaaatcgactacgtgaagtgggatatgaacagaagcatggctgacgtatatgcaggaaatcttgcatacgactacgtgcttggagtgtatgattttatggagcgtctggtgacaagatatccggatatacttcttgagggctgcagcggtggcggtggacgatttgatgcaggcatgctctactacagtccacagatatggtgcagtgacaatacagatgccataaaccgtacaagaatacagtatggcacatcattcttctatccggtatcgtccatgggagcgcatgtatcggcagtgccaaatcatcagaccggcagagtgacaagccttaaaacaagaggcatcacagccatggcaggaacctttggctatgagctgaatccggcccttctgtcggatgaggaaaaggaagaaatcagagagcagatcaagacctttaagaagtatgagatgcttataaatgagggcacctactggcgccttacaagcccatttgaggatgaggtggctgcgtggatgtctgtctcaagggcaaaggacagggcgcttgtgagcgtggttcgtctgtatgcggaggcaaacgcggctgcttgctatgtgaagcttaagggcttggagtcggatgcagtatatattgaggaaaataccggcaggcagtacacaggtgcagcactgatgaatgccggaataccgcttccgtttgcaacaaaggagtatgaggcatatcagttttcatttatcaggcttgatgaggcaaagaagctgtatgatgagataaagaaggtgtgcggcaatctaaaattaagtgaggctgacactgcagatagttcttctgataaacgtattgtaataagcatctacggcggctcaggctcaggaaagacaacgattgcagcagccctgcagcagtattttcttaacgataatacagcctgctatgtgctgaccggggacaattatccacaccgtattccgatgagaaacgacgaggaacgccttaatgtgtataacgagtccggcgaggatggcttacgtggatatcttggaacacctaaggagattgactttgacaggattaacaaggagctttcagagtttaaggcaggaaaagatataattgagataaagcatatgggccgcgaggacggtgatatctcatatgacgagactgatttcacaggaattaaagtgctcatcctggagtggacccatggaggaagcgaataccttaagagtgttgatatacctgtatttctggagagttcgcctgaggagactaaggcgcgccgcattaagagaggacgtgacgaaaacgccgcaagccctttcatatgccgcgtggtagaattggagcaggaaaagcttgatttgcaggggaaaaatgcgcgtatcgtagttggaaaggatggcaaagtctatgaacaataaacctatgcttaatgcatatcctgacagtctgggcggtaagcttttcgatatcgcagcgctgctcaaaaagaaggaaatgcaggacacattttcatcattttatattctgccaagcctgtatcattcggatttggaccgcggattttcggtcgtggactacaatctgaatgaggagcttgcgacaatagaggatttatcgcaattgaaggagctggggattgacttaaagcttgactttattttaaatcatgcttcggcacagtcaccacagttcaaggatcttgtggaaaagggcgatgagtctgagtaccgcgactttttcatagactggaacaagttctgggaaggtcatggagtcatgacagatgagggctacatacagcctgatgagtcatgcttaaagcagatgtttttcagaaagccggggcttccgattctcatggttgagtttccggatggacgaagagtgccatactggaacacattttaccaggaggtgcatggcagagagtatctgggacagatggatttaaatataaagtccgaaaaggtgtgggatttctatcgtgaaacactggaaaaaatagcatcctacggtgcggctatcgtgagactcgatgcatttgcctatgcgcctaaggcaccgggaaaaaagaatttcctgaatgatcctgagacctgggaatttctacagcagattcacgagcttgcagcaccgcttggactgactctgctgcctgaaatacacgcggcatatgaggaaaaaatatacaaaactcttgcagataagggctatgccacatatgatttctttttaccgggactgataattgatgcgattgagaacaggagagcagattatctggcgaaatgggcgcgtgagattgtggaagataaaatctcaacagtcaatatgcttggctgccatgacggcatacctcttctggacttaaagggtctgcttccggaggatgatatacgctcgcttatagatttgattgtatctcgtggcggcatggtcaaaaatcttcacggacagaagaatatatattatcaggtcaatgccacatattacagtgcgcttggtgagtctgacagcaaaatgcttctggcacgtgccattcagatgtttatgccgggcaagccgcaggtatggtatcttgacctctttgcaggcaaaaatgaccatgaggccgtaagacgcgccggagaatcaggacacaaggaaattaacagaacaaaccttagtgcctccgatatcagggaggcgctaaaaaaggatgttgttgcaaagcagcttgagctgcttcgcatgagaaatacacataaggcatttgagaagggagctgtcatcacagtagcagaagaagggccaaagctctcaatccgctatgataacggtgaagcgtatgcgcttcttacggtggattttgaagccggagcatatgagatagagctgagctgatttgtgtattacttatatgaagcagttagaatatatttatcataaaagatgcgatatcaaaaaggaaccggattttccggttccttttttgctgcgtagaattattaacattccagtatttatcagctgttaagtatgtgtaaacgatttcatgaattagctttgaaaacctgtacttctggtgtttatattgcactcaagcaaacgagctacagccgttgctggaagaagcaaaagaagtggatggctcatagaggataataaagaaagagaggttcatgatgttaaatgtcatggacctctctttctttaggggaaaattataaatgtttcaaataattttctacattctgatactcaacgccattttccatgacggaatcttcaccacgatagagcacacatcgcttggtaatctggccaaatctctgacttgtttgattcagtttctcttcgtcaactaagaagcgggcttgcattggaacaattttcgagctgtgttttatttcgtagcattcacatgtattgagtttagcatcgtaaattaccatatcgtattcgccgacagcaaattgcaatttgaaaacacgttgatgccttttagccgatttgaatgtttctaaaagtacgatgtcttccatcatacgaccacgcacttcttccaaaatacgttcagaaactaacattttttcgtgctcgctcaatgtagagaataattcatcttttgtcaaagaatgaaccaatgcctgtgcctggcaataacgcatgcctggttgcgtgaataaaatattctctagtggttcggcacttggaattaccgtttctcgtggaacgtcaacaatcaggtcaagtgctttcaaatattctttgatttcctctatgtgagcatttgtaataccaatagattgttcttctttattgtgaatctccaacatatccattaatcgtttggttactgcttctgtatcgattttatccaaaatatctgtacgctgtttgggattacgatctcttcgcaaaacatcagcagctgaacccaaatcatgagatttgaatttgtcggtcagaatacgaataaggaaacgatgattcatatcctcaatgattcgattgatagcacctgttagttcacctgcctcatagagtgattggagatgacggaaatatcctccgtcttgacaacaactcagggagtgctggatatttttacagattgcggtatcgatataacgccgtgtggattcgtcatcacggaacgaagcatcctctgaaataacgtctttatcatcaaaatccagttctcctgcacgaagtgtgccgccatagcgaatatactcgtcaatactgtcgataccgagtaaacgactatgttcacggaatggaataaaggtagtgtgaatcgtaacagctcgatcataaagttcctggtgaagcgcaaaccaaaagccaagagaatctgttccggataaaacaattttcataccttgtgcagcgtagatatcagagaatagtgctgctgaatcaataaagtcgggcattagggttacttcgtcaataaaaacatattcatatcccagatcaaggagtttgcccaaatcacgattcatcgctgccatggtatcgctcccttttgctttgatgtatgctgattttgcggactgtgatggagtcattcctaaaacagcctgacgcagcattgttgtctttcctgttcgtcgcagaccaaataccaagcatacacgatctgtttcctcactgtttaaatatgcctgtaactgtctgaaacaatcacgttttccccagttttttacaccttttgtcagtgccagaagacgttctccgataatgacagaagtttcaaaatctgtagatttagatggatcaatagaactgtgttgtttcagttctttcaattcttcttgaagctgtttgcgcctttcaacacctgcaaaaatttcttcgcgttcgttctttttaatgtacttgcttttgctttttccattctctgtccattgcagataaggctgctctttgccgtaaattttcttcatgttgatagaaccttgtggtaaggctgctatctcgttttctaattcataaattcgtttgtagatatccataatatcaccccgtttcttacaatctattataacccattttgagtgaaacatcaatgggttataatgggttataacgtcaaaaaatgtggaagtgaaacgactactttttttgtcgtgaacaaaagattgtgaaatcaagatggataaagtataataatcataagttatttttctgggaactatgcgtattgttgtaaaaaacaacggcattgtagtatagttaaaatgtattgataagccggaagagctgctgcagatataagaggtaacaatatggaatacgaacacataacccactccttcgagcctgtctatgatgaaaacagccgcatactgatcctcggcactctgccgtccgttgcatcaagggaaaacaatttctattacggacacaagcagaaccgtttctggaagctgcttgcgtatctattggatgaaccggtgccacagacgatagatgagaaaaaatatatgctgcttaaaaaccacatagccatatgggatgtgatacaaagctgtgacatcaagggttcgagcgacagcagcatcaaaaacgtcgaaccgacagatataaggaaaatccttgaaacagccgatataaaacaggtatatgcaaacggaaataaagcaggggcgctttataagaaatatcagcttcctctgacaggaatggaggcagttacattgccgtccacaagccctgcaaatgcggcatggacctttgaaaaattatgtaatacttggggagaatatataaaaacacatgaaaacaatagaatttgatacacatttttacaaaaagctgtggacactcatggttccgataatggtgcagaatctgatgctggcgctggtggcggtggcagatgctttcatgcttggaggactggaccaaaactatatgtcagcggtttcgcttgccacacagatacagttcatccagaacatgtttctatcagcagctacagcagggcttgcaatactcggagcacagtattggggcaagcaggacataaaggcgctcgatgacatattcgctcttgcaatcaggatatgtggcatagtatcggtgctgtttttcgtggcatgtgcattttttccacgatatctgatgcttattttcacaaacgagccggtgcttatagattatggtgtaagctatctgacaatagcttctttttcatatttattgacaggtttttcacagtgttatatagtcatgatgaagatatcagagcacgcgggtactgcggcggcagtcagctcaattacagtgcttataaatataatgctcaatgccatatttatctatggtgcatttggcatcgagagcatgaatgtgaggggagcggcacttgccacactcatatcaagagtagtggagcttatgctttcaatcacattttcgtacagaccgggatatatcaggcttaaaatcagggagctttttgcaagaaacaaggagctgtcagcagattttatgaagtgctccggaccgattctcggagcaagccttgtatggggaataggctttacatcgtactctacatttatgggacacatgggaacagacgcggcagcggccaactccgtcgcagcggttgtgcgtgatatcatatgctgtctcagtgcaggtatatcaagtgcagcaggcattatgataggaaatgagcttggcgcaggaaatttaaagcgtggaaaagcatatggtatcagaatggcaaagctgtcatttttatgtggcgctgttatgacagtgcttatggcggtttcagcaccggtgattttacattatgtaaagctcacaccgcaggctgcagagtatctgaagcagttattcggtgtacttgccctctacatgattggacgctcggtaaatgaaatcatcataaacggtgtctttggttcgggtggagatacgatgtttgatatgtattctctagctgttacgatgtggggcatagcgataccgcttgcagttgcaggcacatatttcttgaactggccggtggttgtggtgtatgcgtgcacctgcgtggatgaggttggaaagataccgtggacactcatacattttaagaagtacaagtgggtaaaggatttgaccagataagggaaaaggatgaggataatgcagacattaaagctgttattttcaaaaattacagatgatgatcctatatatgagaagaaggatgttgtggagaatatatttgtgtttcgtatgcttttagtgtggcatctgctatatacatttgtattcatactcaattgccttaatatatttattgtcgataagcatatttttgccacaggatatattttatcatgtgttcttctgctggtgtttattgcactgctggtgatagttggactggatcatgcctgtgcaaagtatttgtgtatttcagatgccggttttatagtgctgataacgagctcatcgcttacatatcatatggtaatagttgcgatgttaccaattgtaattgcaggtgtatactcgtcaaagtacctgtcgagatttgcatttgttttttcgatttttaatatagcgcttagtacatatgtgggttattattttggagtgtgcgatgcaaatatggtattgcttactacaacatcacttaagcatcttcaaaaggatggagtatttttgctgaatgaggtgaataaaaatcccggacttacgctttttatgtattatgtctttccacgttcgcttatagcaacaggattttacagtgtcagcaatggcgtaaacaaaatgcttcgaagaacaatggaaaaagcgcaccgtatcaagcgagaggcagcaatagacgatatgacgggtctttacaataaaaataagctccttgatgaccttgaaaagccacaggaacctgacagaagggttgcagtcatatattgggatgtaaatgagcttaagtttgtgaacgatacatacggacatgagatgggagaccgtctaatagcgagaatagcgggaactatcagacttgttgcagcaaatgataatgataatgtaagaacataccgctatggtggcgatgagtttatcatgatcataccggatgggactgaggacgatgcacttagctttattgacagatggaataagctgatggaaccaatccaaaaggacagtaaaatcccaatttccgcgtcagtaggttatgcctgcggcagatacgccgatatcaataagattatctgtgaggcggatgagaaaatgtatgaaaacaagcgtgtgcgcagggattagtaaagcgagataactgattgcctgtcaacaatctcgacatccataatctcaccgaaattattgtctgattcattatcctgtattttctttaggagaagctcggttgcaagccgggctttttttggtacattttgtgataccgatgtaagcttcggtacggtgtactggcatagattcaaattatcatagcctatgacagataaatcaatcgggacacggtaaccgccgagacgcgcaccctccatgatgccgatagcacatatatcggcagttgttaccactgctgtgattggtgacttgctgcctgcaatggcacggccggcttcgataccgccctcatatgaaggtggatagctgaaaatatattcaggacggaaaggaatatgactgtcctccaaagcttttttgtatccgttaaaacgtttggtgaggacgatattttcctcataatcagctacaaatgcaatctcggtgtgcccgtgatttatcatatatttggtcgacaaatataagccattttcatcatcagatattacatttatgagattagggtgagagtaattgctgtcaaaggtagcaatagggcagttggctgcatccatcagcttttcaagattttgggcagaggtggggaaaaccagaatcatcccatcgacattccagttcttaaccaaagataatatgtctgagcttctggatactgattgaagcatggtgaagtatccgtttttgtgaagctctgtctctatcgtaccaatcattgtactgacatatgggttctcaaaataattgtatcctgaagcatattctttctcctccagaaatgtaacaactccgataatgtgtgaggaattgtttgaaagacttcttgcattcatattcggaacataattatattcctctataattgaattgattttatcccttgttttctgtgaaacacggcttgtctttccgttgattacgtttgagacggtcatcgtgctcacgcctgccatttcggcaacatccttaagtgtcatattaaactccattctattcagtattataattttttactataaagtttatacataaaccacaataagtttgaacataaactataataagttatacataaacaatgataagtttatgcataaaccgaatatgattcaaaatataggtttataaattaccttaagtatacatttttattttgcaaatagcaatctgtttttgcaaatatttacacaaaaccctaatttacatgtaaaaatgcacaaaaaacatatgaaaataatatgaaaagtgataaaaaaacaaaaaactattgacgaatgtataaggtggtggtagattatagtcagatttagcgctaaactaatttgaacgaaaaagaggatattgaattaagaaagtgaggatttctatgaagaagaaacttattgcaacagttatggcagctacaatggcagtgacagcgcttacaggctgtggcagctcatcggcttcatcagctaaaaaggacataaaggtaccaacaaagccatttggcgatacggtgaagtatgacccttcggttgagattaatgatggaaaggatatctcaattgacctgtgggagtggggaagcgatgaattatttcagaaggttattgacagatacacagctattcatcctaatgtaactataaacctggtggataatccatgggaagattactggacaaagcttcctctggcactcgatggtgaggacggaccggcactcttcgatgtacataacagctatcatgagaatcttatcaactatatggctccgcttgatattcctgttgaggatttggagcaggacttcaatggagtgagcgctcatgtgattgatggtaaggtttattacattgattacggaatgatgacaggctctgtttattacaacaaggagatgtggaaggaagccggattaacagatgatgatattccaaagacctgggatgaaatgattgaggtagcaaagaagctcacaatcaaggacggagacaatatagtccaggccggactcaatttcaataatgatttccaccagaattatctgcttggtcttaattatcagcttggtgagaacctctttaaggaggatggaaagacacctaatgtcaattcggatgccatgaagaaggtaatgcagatgcttgttgatatgtacgacaaggatcagattggttcaaaggattttggcgataaatgcgcagacagctttggacagggacagtcggcaatggttattcagtggggacattattacaatacacttaagaccacatggagcgatatagattttggcgtatttgaaattcctacatttgacggaaatccatatgcatacaatagatataacggtgagtcaacattcggtgtaaacaaaaaagcaccaaaggatcagcaggcagttgcacaggattttgtaaagtttttcctctgcgatgatgagtctcaggtagatttcaatcttgctatgagtaccttccctgcaaagaaatcccttgcagacaatgaggaaatacttaaaaacccatcgcttaaggtacttgcagagcacattgaccactacatctggccgggtccgatgccttcatgtgttgaggaggatatgaaaaaggccggagaggacatattctacaatggagtggatattgatacagctttagacaaggcacaggctgatattataaaggatatgaagaacagttcattccaatcagtcgagaatctatataagtttgcaaaataacaggtaaagattcactacggaggattattaatgtttaaaaaatcacgtccattacaaagtaagagtgaaataattttaagaaacatagttgttttagctatggtagttttctttatagtgtttttgataataccaattggtatagcatttgcaggaagctttcatgagtggaatccgttaagcggaacatacaagtttttgggtctggaaaattataagcaggtgttcacgagcaaattgttcggcaaatcaatgttcaataccgtaattttttcggtagttgtaattgttttcagagtcggtctgggactgggaatcgcgtatgctatttattcaacgcttataaagcataagagctttttcagggcagtttactatatgcctgtagtaacgcctatggttgcagtggcatttgtatggaagttcatgtacaatccacagattggaatcatcaacaaaatattcgggctcgatatcaactggctgatgaatcccaaaactgctctgattgcagtaattataatgaccatctggaaggattttggatatgcggttgtcatgtatatggcaggcctgtactcacttccggcagatgtcatggaggcagcacaggttgacggagcgagtggctggcagaaattcagatacattacattgccgttgcttaagcctatgacactttttgtagtcattacatcaattatttcgtatatctaggcatatgttcagatactcatcatgacagagggtggaccgggaacatcaacatatctggcttcttacattatttacgatgaggcctttgtcaaatacaactttggatatgcatcagcactttcatttgtgctttttgtgattaccgcagtgcttaccgtgctttctttcaaagtatcgggcaaggaagagtaggaggagaatatcatgagaaaaaaagtaagcagtatagttttaaatgtattccttctattattgggcattgttacagtttatccgtttatatggatgctatgctcatcatttaagcagaataaggaaataatggcgttgcagcaacatctgcttccacaagagtttacaatagacaattacatcagcatgaattcgcatttcaatttcatgaggttttttggaaacagtttgtttatcacgattgttgtaaccctgcttgtggtatacaccagtacaatctgtggttttgtattaagcaaatataagtttaagggcagaaatatcctatttggctttgtattggctactatgatgattccatggtgtgtaacaattattccaaaatacactatgattcagaaattcggatggatggacagctataaggcacttattattccggctatgttcagcggatttggaatatttatgatgaagcagcacattgagaccatccctgatgagattattgaagctgccagaatggatggcgctaatgagttttatatctttcacaggattatatttccgatggcgaaaaatggaatttcaagtatagcaattttccagttcctgtggacatgggaggactatctgtggccttatcttgtaatcaataccaaggaaaagcagctattggcagttggtcttaagatgtttaacggacagtattcaacagattatggcgcactttttgcggcaacggcaatatctatcataccggttttactgatatatctgttcttccagaagcagtttatcgcaggaattgcggcatcggctgtcaagggatagcgtaatttatatgagagggagtatttcatgcaggaaatatacagagtaaagacaagtccggtggcattatcggacaatatgataataggtgaaaaatacaggattacattactgacagaggcgcttgtccgtctggaatacagtgaagatggcgtattcgaggatagggcaacacagacagtattgttcagggattttccaaagaccggctatcatgtggtgcgtaacgctgatggaattgaggttcatacatcaatgctgcacctgatatataatgagaaggagttctcatcacacggactgagtatacagattaagggaaacctgagcgcatatcacagcatctggcattatggcgagaaggtgcatgatttgcagggtacagcgcgtacacttgatgacgtaaacggagaggttgagcttggacacggtgtcgtttcacgctttggatattcaattcttgatgacagtaaatcacagattttacttgacgatggatggattgagccaagaaaaaaaggtgtgtctgatttgtatttctttggatatggacatgattataaacaggcgctcaatgatttttacaggctttgcggcaagactccgatgcttccgcgatatgcactgggaaactggtggagcagatattataaatactcagaagaaagctatatggagctgatggacaaattcgatgaaaagaatatcccattcacagtagctgtaatagatatggactggcatcaggttgatgtggaccctaaatacggaagcggatggacaggatatacttggaacaaaaagcttttcccggatccgaagcgctttcttggaaagctccatgacagaggaatgcatactaccttaaacgtacatcctgcggatggtgtgcagggctgtgaagaaatgtatgttgatatggcaaaggaaatgggcgtggactatgaaaatgaggacccggttgtatgtgatccggcaagcccaaagtttatggatgcatattttaagtatcttcatcatccgagagaggctgaaggtgtggatttctggtggattgactggcagcagggcagcaactgcaaggttgaaggattggatccgctatggatttttaatcattttcattatctcgataataaaagagacggtaagcgtccaatgacattttcgcgctatgcaggtccgggaagccatagatatccgattggattttcgggagatacacatattacatgggagtcgcttgattttcaaccgtattttacaacgacagcgacaaacatcggatatggatggtggagccatgatattggtggacatatgcttggctacaaggatgatgagctgacagccagatggacacaatatggtatattctctccgataatgcgtctgcacagctcatgcagcgaatttaacggcaaggagccgtggcgatttaaaaaagagactgaggaagcgatggaggcagcgctcagacagaggcattgtatgattccgtatctgtatactatgaactatcgcagctatgccgagaatatgccgctgattgagcctatgtattatgagtatcctgaaaatgcagaggcttatgaggtaaagaatcagtatttctttggcagccagcttatggtagcacctgttacaactccacgtattaagggacttaatgtggcaagaaccaaagtatggttcccggagggcatctggtatgatatctatacaggcatgcgctatgatggtggaagaatgctggaggtttacagggatttgagcagcataccggtgtttgcgaaggcgggaggcatacttgtgtgtgcagatgctgatgagcttgatgcaagatctgttatcaaaaatcctgatgtattatgtgtcagggtattcccggaggctgatggtgagtttgagctatacgaggatgacaatgaatcctgcggatatgtggatggcagatgtgtgaccacagctatgaaatattctgcggataaagatatgtttgtcatttctccggcagatggagatacatcattaatacctgacaacagaacctataagcttgtctttgaaagaagaaccgaggcagcagccggtaaggtaaaggtatctgtggacggtaaagaggtctgggcaaagaatgaatatgataaagaaaacagaaagctcatcgttactgtaactgcatcgacagcaagcaaaataagcgttacaatatcgaaagacacagtagcgtttgataatcaaatcgaaaaaagatgctttgatttcctgaatcaggcagagataggctttgtgctaaaggatgaaatctacggtcttattacatcgggaaagaaaacaacagtgattttatcagagctcaaggcaaaggagcttgatacagagctgtatggtgtattgacagagatacttacagcctgaggcagtcaccggtcatactaggtgtgaccggtgactttctttgttgtaaaaattaaaaatggatgatactattatagtaaacggaagtatttttataagaaacatcaggagaaactatataattcaatggaggattatgcaatgggaaattcatataagaactgtaaaatacaggacaacacagcagagctgatctacgagaacggcagtctgtttgttaccatatttgaaaacaacatagtgcatgtcgcacaaaaacccggcatcgaaagtgttgcaatcgaggagggctttattccgaaggctgccacaccgaacgtgacctgcaaggatacatctgatgccaaggggaccgcagcagaagccgctgtaagcgatgcagcagttaaagcagtcataagtgcaagggatattactgtaaatgtgaaggataacgagaagcttgatatttattacaaagggaagcttgtgctttcagattatgaaaaagcacgcaaaaagagtgagaagaatccgtacgaggatcttgccatcgcagagcttgagggacatactgtcggaaaagatgaagaaaaaactgactctgttaccatcatcaaaaagcttggaaaggatgatgctatttacggtctgggagataagccgggatgcctcaacaagcgtggatattcatatgtaaactggaacacagatgatcctgcgccacatgtggacagcttcaaatcactgtataaatccataccattttttatcgtgttgggcgatgaatattgctatggaatttttgcggataatacctacaagacaacctttgatttcggttatgaaaacacagattactatttcgtcgagcatgagaagggtgagctggactactattttatgccgggaaatgatatggcagaggtggtaggactttatacatcactgacaggcaccacaccgctttatcagagatggatatacggcagccatcagagccgctggggctattacacacaggatgaggtgcttgatatagctgacaaattccgcgagcttgatatcccctgcgatgtgatacatatggatatcgattacatgaacggctacagggtattcacctttgatgacaagaaattcccggatgtaaagggcctttcagagaagcttgctgacaggggtgtaaagctcatatccatcattgacccgggtgtgaaaaaggatgaggattatttcatgtacaaagagggcatggagatggatgcatttgcacatgatatagatggcagtgtatatgaaaatgctgtctggccgggaacatcggtatttccggacttcacaaagcaaagcgtcagaagctggtggggagacaagacaaagatacttctcgagcacggtatcagtggcatatggaatgatatgaatgagcctgcaagcttcaacggaccactgccggatgatgtgcagtttgagtatggagcacatgaaaaggttcacaatatttacggacattttatggcaaaagccacatatgagggacttgcgaaaaatgatggtggaaaacgtccgtttgtacttaccagggctgcatatgccggaagccagaaatactgcggtggctggaccggagacaatcacagcatctgggcgcatatagcactttcactcgagcaggtgtgcaatctgtcagtcagtggacttgccatgtgcggcagcgatataggcggtttcggaagtgatactacaccggagcttcttgtcagattttatgaggcagcagtatttgtgccgtttttcagaaatcattcagcgatgggaacacgcagacaggagccttggcagtttgacgagactacgatagatgcagtcagaaagacagtaaagctcagatacagatttatcccatatatctatgatctggcacatgagtgtgaaaagacaggagcacctatcgtacgcccgctcgtatacgaatatcctgcagataagcatgtgagaaatatttccgatgaatatatgctcggaagctttgtactggttgcacctgtgatcgcaccgggcaaggaggcaagagaggtttatctgcctgacggcgactggtatgattactacacaggcgaaaaatacagtggcggcagatatattttagcagatgcaccacttgataaagtacctgtcttcataaaagcaggagccattatccctgttgcagacggagaaatccgctctacagaggacattacagaggataagatcagtatactgacatatccgggcaagggcagtttcgtgcattatcaggatgacaatgagacgttcgcatacagaaacggtgagtataatgctgttgagtataccttggatggggataagctcgagaagaaagtgttgcataagggattgtaaaaatacataaccttaaatttaaaattcaatatcaacctcaacagggcagtggtctgaaccgagcacatcggtatggattgctgccttttgcagcttatcattgatgcgctttgatgtgataaagtagtctatacgccagcctgcgttcttctcgcgagccttaaaacggtatgaccaccaggaatatataccctcggcatccggataaaaatatctgaaggtatcggtaaagccggaacataaaagttccgtcattttagcacgttcctcatctgaaaaacctgcattcttgcggtttgtttttggatttttcaggtcgatttcattgtgtgcgacattcagatcaccgcacagtacgacaggctttttggcatcgagagtcttaaggtattcacggaaatcatcctcccactgcatacggtacggcagccttttcagttcattctgtgagtttggagtatagcaggttacgagatagaaattgtcatattcgagtgtgatgacacgtccttccctatcatgctcctcaatgcctatgccgtaagacactgataatggctcattttttgcgaaaatggctgtgccggaatagccttttttctcggcgtaattccagtactggtgatagcccggcaggtcaaggtcaatctgtcccgcctgcagcttggactcctgtatacaaaagaaatcagcgtctatactgttaaaaaaatcaaggaaacctttctggacgcatgcgcgcagtccatttacattccacgatataaatttcatgtcttaatcctccatataagtgtgtgtattaaaatcatatttaaaaagttattcttcttacaaaaacgaaatcatataagcaggcagacagagtatgtctttgtcttttgagaaatcctttgtatatacgagatatttttgaagaatacggtttgaaaattttattgaaaattcatccagggacttatgggttttatagccactggattttacttcaatagggcaaaccttattttttttggcaataagaaaatctatttcgtaattatggcgcgaactttcattaaaaaaagtatagtaaaataattcgttgccattacacgttaaaagctgtgcaactacattttcgtaaagatagcctagattagttcctagcttgtcatttaacaatttttcataaattatgttttctgtgaaatctttgtctttaaacatcaatgtagtaaacagcccggtatcgcataaaaatagtttaaaccgggttaagtctttgttggttgacataccggcacttgggtcatttgcatggtatgataccaaaacagtttttgagtcttttaactctgcaatcagttccagtgtattatcggcgcgattgtttgtcagtacgcttgatacctgatatcgcgaagcatttttgtttagctgcgcaggaattgcatcaaaaagcatagatatttttccagtggcatctatttttttgaaatcatcttcataaagattcagaatatcacgctttacgtcatcaaccttacggaagttattggttttgatatattcatcaactgcctgcggcattcccccgacaagcatataaagacggaaatcacgcatcaatttacgattaatctcttctccgaagggtttttgagaatcgaatagcttatggattagggggatagttgtttcatcattcaaagcccataaaaattcttcataatccataggatacatgtttagctttctctcttcgcttggaataagtatatcctgtacgttttttttgatagaaatcagagaaccggtttctatataatcatatcggtgatcttttacaagtgatttgatagcctgtcttgcgcgggggcataattgtacttcgtcaaaaataatcaaagactctctctcatagagatcgactttgtattggagctgcaactgcaaaaacagataattcagatctgaaatatcctcaaacagttcacgtatattttttgagacgattgagaaatcaatgattatataacttttgtattcatttcgtccaaatgactctacgatggttgacttgcctatacgacgggctccttcgattaagagtgctgttttaccatcggaatcctttttccattgcaataatttatcatatatttttcgcttaaacatgacattctcctaataaaattacaaaatcgcattttttattttgatgttttactacaaaatcgcattttttatttcaacgatttaccacaaaatcgcatttttttttgttattttaccacaaaatcgcattttttaaaagaggtttgaatctgcagattacactttttatataaaatcgttactgttcacactaaacagtgtgaccagcaacataaaatacgtataatagaggaagaaaatacgcaagataatacgcaagatggagtcggttcataagctgcaccaagctggcaaagaaatcagaaatatgtgaaaatatgacataaatataataaatccgctacactatatcatatgattacgcacatgatataatgcagcggattttattgttgattattttaaagctcaagtaaaattttttacagcacatcgcttccatcaggaatctttgagatgacagttctgttgatcctgattaagaataatgtcgaaacagtaaaggatatcacctctgctatcgggaaagcccaccatactgcgtgaagtccaccgagctttgaaaggatgtatgctgccggaattaaaaccacaagctgacgcatgattgatacgatcatggaaaagactgcttttcccaaagcctggaatactgtgccgacgataatacaaaaccatgcgatgaggaaatgcacgccgattattctgagcgccggaacaccgattttaagcatatcgttagaggcgctgaacattccaagaagcacatgtggtatgaactcaaagcaggcaaagccaacgaagagcagacagaatgctgttatcaggctgacctttattgttttaaccatacgctttctgttctgagcaccgtagttgaatgcgatgataggtgtgattccgttgttcagtccgaatacaggcataaagaagaagctctgcagcttgaaataaacaccgaaaacagcagcggcagtcgatgaaaagccgataagtattctgttcatggcatatgtcattactgagcctatagactgcatgatgatcgacggaataccgatagcataaatggttcccatgattttgaaatccgggctgtagcccttgaagctcaggctgatttcatgattgaatttgtggttgcagacaaaagcaacaacggcggctacgcactgtcccacaacggttgccacggctgcaccggtagcaccgagcttagggaagccaagcagtccaaagatcatgataggatccagaatgatatttgtgatggcaccgcaaagctgtgaggtcatgctgaaaatagttcttcctgtcgaggtaagcaccctctcaaaatagatttccgcaaaaataccaaatgaaaaaatcataacagtactcaggtagctcacacccatatccatgatttcgatatcagcatttccaatctgactcatgtaaaaaggctttacgattgtaagtccgagaatcagaaatattatgtagctgaatgcatatagtacggcaccgttgatgccgattttgttggcttcatcatatttatgggcaccgagtgactttgacagcagcgcgtttacacctacaccggtaccggttgcgacagcgatgatgagtgtctgcaaagggaaggcaagtgaaactgccgtgagtgcgttttcggacagctttgcaacgaaaatactgtccacaatgttgtatagagcctgtacgagcatggaaatcatcataggcaaagacatgttaaatacaagtctgccgataggcatggttcccatcttgttctctgttacaggggctgaatttgtttcctgactcataattcctcctattgtaaatgattgttaatttaaaaatcctacattatatgtgtacgaagctttagttattaaaattaaaatcaccggtagattagccggtgtttaaaatgtgcaacaaagcgccaattacatataataccatgactgcaggatactttcaaggtattatataactgttaaatcatatcataatagttaatgaaaaaatgcctcaaaaagtatagcattgcagggtataaattacgataaccgcttgacaaaatgacagagagatatataattagttcaaaaatgaataattcaaaaatgtataacgaagtagcaaaataggaaaagaaaagaaggaatatcacatatgaaatttaactttgagtttgcagagaagatttcgcgaacctacagcgatgagtgcagaccactgtgccatgagctgaagcttccgcagacagcctttgatatactcatgtttctggcgaacaatccggaatataagacggcaagggatatagttgaaataagaaaaatcaaggcaaatcttgtgtctgtaaatgttgataagcttgtgaatgaaggctatctggagagaaaacctgtggaaaatgataggaggaagacggagcttgtctgtacaaaaaaggccgggactgtcattgaaagaggaaggcgtatacagcagcagtttacagcaaatctgtttgcaggggtagatgaggagcagaaaaagcagctgacgattgttatggaacagcttgagaataatatggatgaaataatcaggaggaaatcacacaaatgagcacattaataactataatagtaacattttttgccggtatgggcgcaggccttggaaccggctttgcgggactaagcgcagcagcagtaataagccctatgctcattacatttttgggaatggacccttatatggcagtgggaatagccctgtcgtctgatgtacttgccagcgcagtgtcagcctatacatatggaaagaacaagaaccttgatgtaaaaaacgggctcataatgatggtcacggttttatgcttcacggttgtcggaagctatgtatcaagcctcgtgccgtcagcaacaatgggcaacttttcggtatttatgacatttttactcggaatcaagtttatagtccgtcctgtcatgacaacaaaggaggccatgcagggagtttcagctaaaaagagagctgtccagtcaatcatctgcggcgtgcttatcggatttatctgtggcttcataggtgcgggaggcggtatgatgatgctcctcatcctcacatcagtgcttggctatgagcttaagactgcagtcggaacgagcgtatttatcatggcatttacagcctttacaggagctgcctcgcactttgccatcggtggaaaaccggactggtttgtgctgcttttatgtattgcatttacactcctttgggcgagaattgcagcggtctttgcaaacaaggcatccgcaaaaaccttaaatcgtgctacaggtattgtgcttgtaatacttggcatcgtggtatttgcattttcacttctgagctgatttttcttgaatatataactgtaagccccggctgcccgaccggcacacacagcttccccgcgtgcgaatagcgaagctgcttagatactgtagaaattatgccatgaaacacagaaacgctcctgcatggacgcaggggcgaggagaaccgcgccacggacggcgcgtttcgacggtttcgtcaggcatagaagctcttcaagcataatttcgtacagtatcttagcagcgcagcgtagcacgcgggggaagctgtgtgtgccggtcgggcagccgggacttacatcattacataaaacaagaaaaaatcatcatatgtattttaaggggattgcgaaaaaaatctaccattttgtgcaaaaccacatatttaatagaaagattcacataaagattattgagaatacagtattgtgcccttagaaaaatagtactatactaaattcatctgacgaattcagacttgagtataaataataatatgattaaagggtcaaaaggtatcataagataggaggaaataacaaactatgtcttcaaaaaaagatgcgatgaaaaagaaattggaaaacatgcatttgggtgaaaggattaactatggctatagaatggttattaccatgatgcttatttcgggactgctttcgattgcggtcattggtgtgttgtttttcaatatgttaaactatgtaaacaaggtaaatgctgccgatcaggcggttaagacatgtagaataaatgtaaatgcagcggctagaaatgtaagagagatggcacttaatcctgacaaatcaacatatgacgactatgagcagggcgcaaaagaaaagcttgaagatgttgatgtgcagttaaaaacaataaaaaaatcaggtatcgttcctgaggatcagtataatgaatattcaaaggctctttctgactgggcgaatatcggatactcaatcatggataagattaaagccggacagaaggatgaggctgttgatcagattatcaatgagtgtacaccaaagttaaataaaacagttgagcttgcaaaggaaatcaacaagctgactgacgaaagaagccatcaggcagttgtaaggacatatgtatgtgctgcagtcggactcatagtcatcattatctgtctgatatgtgcatggcagttgacaaagagaacaggaaagatcgtgcttgatacaatccttgagccattacatgcaatcgaggaagtggcaaaggagctgacagaaggaaatcttcacagcacacttgattaccgttcagaggatgaaatcggtagattggcacacagcatgagaaagtctatccgtattctcggctcatatgtggatgatatagacaggtcgatgaagctctttgcggacggacattttgatgcacagccggaagtagagtggagaggcgattttgtaggtattttacattcatttatggaatttgaaaaaagtatggcagtcaccataaagggaatccagaatgtatcaagcgaggtttcaagtgcggcagagcaggtagctgcaagctcaaatgaccttgcagacggtgcaaccaatcaggctgcggttgtagaggaactgacagcgacggttgagggagtttcagagcaggtggagcagaattcaaagagtgcaaaggaaatcagtggaagagtggatgagcttggaggtgcaatttgggaaagcaatggaaagatgcaggagatggttacatctatgcatgaaataaacgaagcctctaaacagatagatcagattatatcaaccattaatgagattgcatcacagaccaacctgcttgcattaaacgcttctattgaggcagcaagagcaggggaggcaggaaaaggctttgcggttgtggcaaatcaggtaaatatgcttgccgatcaaagtgcacaggctgcaaaggaatcagctgcgcttatagagacatctgtgcaggctgttgaaaaaggcatgaatattgcagagcagacagcttcacagcttgaagaagtagcagagaactctaaggtgattacaaaagaggtgactaatatagctgatacactggagacccagaccagtgagatcaagcagattaacgaaggaattgagcagatcaatgatgttgtacagaccaattcagcaacatcacaggagtgtgcggctgcgagccagcagatgagcagtgaatcagaaaatctgagtgaaatgatagcaaaattcaaaatctcagacattgaagagtaatataatagaaggtgaaatttaatgagggcttttgatgcatataaaatacttgacgagcaggaggcaggaagtctgatagacttaattgcaccttgtatggatgattatctgtatattatagatttaaagaatgatacactgaggatatcacagtcagcggtagagcgttttatgcttcctgataaatttatgaatgatgcaacaaagcatcttcgtacattggtttatgagaaagaccgtaagctgctcgaaaatcacaagcgtaaaatatatgatggaaaagaaaaaaggtacaacgtgctatgtcgtttgatgaacagcaaaaatctcccggtatggattaactgccgtggggaggtcatcaatgacgaggcggggaaaccacgatatattataggctgcatgaacgagacaggaacaaggcagcgagctgacaatatcagtgggctgttaggtgaaaaggagatggcatcatatctctattcacagcctaaagagaagctgtcaggttatttcatacagattggaattgacgattttgggataatcaataatgttcagggtcagatatatggcaactacatacttaaaagagtggccgaatgcatagcagaatgtctctcaagcggtcagagaatatatcatcttgttacagataagtatatgcttgtggatatgcttagcaaatcgcaggatgatgtggtgcagttgttcaaaaggatagatgaaaaaattgatgagtttatagttgatgaaaactataaatcaatcttttcgatttctgccggagtgacagatatatcaacactggcagagggcgtaatagagtgcaggaaaaagtcggatttttctttaaaatgcgcaaaaaaaagaggcggaggaagcctttatttcttcgaggaagaggattataaagtgtcattgcgcaaaaataccatcctgagtgcgcttcgtagcgcaactgtaaatgattttgaaggctttgaggtatattatcagcctatcttagatagtgctgatcgaataatcggtgcagaggcacttttacggtttttcatgcattcggatgagggcgatgaaatgatttccccggttgagtttattcctttactggagaagagcaggctcatcattccggttggagagtttgtattgaacgaagcagcaaaaatgtgccgtgaaatgcagcagtatattgcggatttcagggtaaatatcaatgtatcatatatacagattatgcgtggaagtatggcaaataaaatccttactgctatccgggcaaacaatctgagacctgaatccatctgtatcgaaatgacagagagtggattcatggatatgacgccatgtttttgcagcttcaggaaaaagcttgatgagaataatatccagttcataatagatgattttggaacaggctattcaaatcttcgctatatcagtgagatgaacccggactatgtaaagatagataaggattttacggcaagggcgatgagcagtgagaaggactatgagctgttcagaaagattatagagatggttcacagtataaatataaaaatctgcattgagggaattgagaaggaagagtgggcttgcgcaatgaaagaaatccatgtagattatatgcagggatatctgtatggcagaccatgcgaaaaaggcgtgtttttaaacaactatgggatataaggaatattttccgggagttacagacaaaaagaatgccaatgaaatatttgaaagaatatttaaacgtacagaaaaactaaacatcaaggtattgggcaacaggaggcaagtcacatgcaaaattccaaagaaaaaactctttcccaaaggattgcagagagaattatcaaatacatactggaggaaaatctgcagccgggtgacaagcttccgaacgaaaccgtaatgtgtgaacggctgaatgttggaagaagctctctgcgtgaagctatgcgagcactcgcatcacgtaatgtgatcaccatacgccaaggctccggttcatatgtttccgccactcccgggatgattgatgatccattcggcctgacctttgttgaagataaacaaaagatgattaaagatctgatggaaatcagatttctaatcgaaccatcaatagctgccatggccgctatccgtgcagatgagacagatatccaaaacatacttactgcatgtgaaaatgccgaaaagctccttcttgcaaataaaaatcacactgaaaaggatagagcatttcatactgctattgccttaagcagcaaaaatatagttgttccaaagctggttcctatcatcaacagttcaattcctctgatcagtgattctaaagaatacaccctgcgggatgaaaccatcgaaactcatcgtgaaattgcagatgcaattgcagcccacgatgccgtccgtgcccacgatgcgatgtatctgcatctgatctacaaccggaagcatataaaatccataaattaatgactgtccggttatcaccggccacactgcgatgtgaccggcagtaccatattttgtggttctggcgcttgaaatagtcgctcagcaacctgtttacgttatacatcataagtcattttggttgggatgttaaagtgttgctaatgataaaacataaagtttatatattactacattaagaaagaaggatgaaattatgtatgaaatgaaaccagaatattatatcggaatagatatgattgatgaagagcacaagcagttatttaaatatgcagatgaggcatatgaactgctgcatgatgagtttacaccggataaatatgataagatggatatcatcttggagaagctccgtgactacacagtaaagcactttgctgacgaggagcagtacatggaatcaatacattacaagaagatgtttacacagaaggttcagcatatggaatttgtacaaaagctggatgagttcattgagcatcatagtgatgaggagatagatcaggatgagcagatcatgggaatcctcaagtatctcacagactggctgataaaccatatcctgtatgttgactgtcagataccgaagccacaataaagtacctgagttttagcaaagagtaagtaccgcaggtcgccgtctgccgtggtagcgcacatactccccataagcgaatagcgaagcggcttagatactgtagaaattatgccgtgaaacacagaaatgcccagccatggacggctgggcaaggcgttatgcgccatggacggcgcataaaagccggtttcgtcaagcatagaaagactgtaagcataatttcgtacagaatcttagccgcgcagcgtagcttacggggagtatgtgcgttgccacggcaggcggtgacctgcggtccgtaattttatagaaaaatatagcgtaatcagcatatatttggtataatttggatatgaaaaataagcgaagatttgcaatggtctcagtttcagtaatcgtagtagcattgattctcgaggcgggaattttgaaatatgtaaatgatgcaaatgcatataagctatcaaaggtgcttctggatcgtgttttcactgtgctcgataaaaatgaccagagtgaggaggaacttatagaatcgttaaaggacgattatatagtcagggcaaaggcagtgtcatatatcgtagatgcaaagccacaggtagaaaatgatgtggaggaattgcaaaagatagcaaagctgatgtcggtagatgagatacatctgtttgatgaaacaggttgtataaccagcggcagcgtgccaaaatactttggctacagctttgattcggggactcagatgtcatattttaaaccaatgctcaccgataagagccttacgatgtgtcaggatgtcacaccgaatacatcagagggaaaggcaatgatgtattccattacctggaatgaggctggtacaatgatggtacaggtgggcttgaagccgcaaaggctcttagatgaattgaagcagaatgaaatatctacggtggtttctgacatgcctgtgtacaagggcatggaactatatgtggcagatgcagatacagaactggttaagggggccacagattgtgacaaaataggaaaaactttccacgatttaggctttccaacagatattaaggaaagcgataagcccacagtaaggcagattagcgtaaatgattcaggctgcagatgtgtaatcaggagaggtgacaaatatatagtggctgtcaccattgacaaatccttttataggatgaacagtgtagtagcactgcttgtggttggcatatatcttatactcgcatcgtgctgtattatgtatatgttttcgaagattatgaaggaaaaatatgagaaagaaaagctgctgtatgtatcgaatactgatgcacttacagggtgcctgaacagacatgcctatgagacagatatcaataagcttgatttgaaaaaagagtgggtatatatatcacttgatttaaacagcttaaagcacataaacgatacatatggacatgatgtgggagatgagatgatttgcgcagctgcagcctgcatgatggcaagctttggtgagtttggcaaggtatacagaataggcggagatgagtttgttgtgatagtcacccaaaagccggatgagcttgatgctatgacaaagcatttcgacagtagtgtagccgaatggagaggaaaaatcgtcgattccatgaccatctcatatggatgtgtaagaagtctggaggaagactgggagcttgtacacgatattgagaaggaagcagacaggagaatgtatgcaagcaaggcacgctattacagtgacagtggcatagacaggagaaagtaaattaaaataaagattccatcattccggatatggtattgatggaatcttttaagtgggaaaataaataattagtggaacagctctacaataaataccgctacacaggaagccacggccacggttgtaagccccttgccctttaatgcaaatatcactgccgcgataagtcctgctactgcaccaacccaccagttagtagcataaaacactgccggaatagtcatggcagttaaaactgcatacggaatatagtatagaaaagatcgcacgaagctgttgctgatcttttcttttattgcgataaaaggaataacgcggatcagatatgtggagcccgcgagtatgagtaaatatataaaaaatacactgtttttcattatgtaaaatctccttatacgtttattatcaaatatttaataaatcattccttatcagtatcatctgcaaccggaaacagcagcgaaccgataactgcagccacaatggctacaacagtgatggtgataccgcttgaaatccttgacaaaaacggtacgtagtaaaacatgcagctaagcacgagtgcaagcagcacaacaaacacgaccgcacgcgatttcttcatctcaggaaccacgatagccacaaacatgccataaatagcaagactcagcgcactcataagcctatccggcagaatgcttcccagtatagcacctatcagcgtaccgacagcccagccgatgtatggaagagttgaaagtcctgcaaaaaagcttctgctcacagaatcctcctggcttgccacggcaaaaatttcatcagtcatcataaagccgagtatccatcttgaaattccgctaaatctggaatcagccttctgaccaaccgaaatcgacataaaggaatatcttatattaatagtaatctgcgaaataagcatctggaaatactgtcccggatgcatcataattccgatgcctgcaaactgtccggcagatgtgacagtggtcatcgaaatgagcacagcctgccaccaggatagtccatatgacaccgccataattccaaaagtaaatgaaactgacagatatcccagcgcaatcgggattcctgctgtcagtcctcgtttatagttttccattctaaattctccttagcataatacaacaacatgttattctagcacaaatttcatgaaaatgcactttcaaattgtttttggaaactacacctgactttcaaattatgataaaataatacagttagaggaaaaaggtgttatcgatgcatgcaattcgatgtataccttactgaaccacatataaacaaaaatagaggaatgataaaatgaaggttgtagtagcaattgattcatttaaaggaagcatgacaagcatgcaggcagggatggcatgcaaagaaggcatattggcggcaataccgaaagcagatgtggtggtcagaccacttgcagatggtggcgagggaactgtaaccgctttggtagagggtatgaatggcacatatgaacatgttgatgtaacaggaccgatgggacaaaaggtgcacgcaacatatggagtacttgaggatgatacggctgttatggaaatggcagaagcatcaggaatcacacttgttgaaggtaaaccagatccgtggaaagcgacctcattgggtgtgggagagatgatattggatgctgttcacaagggctgtcggaatttcataatcggaataggcggaagcgcaaccactgagggtggcataggaatgctgacggcgctcggctatgagttttatgatgaggatgacaatattcttccaccggtatttggctcgcttgcaagggtaaaaaagatcaaggctgacaaggttcctgcagaattaaagcagtgtcatttcaaaatagcatgtgatgttactaatccactgtgcacagagcagggctgcgtatacatttttggaaagcaaaagggcgtacaggagcatgaaaaggcacagatggataaaatgatgagacagtatgcagactgtgttgaggagtatgcgggaaaaagatttagcgagacaccgggagcaggcgctgcgggaggtcttggctttgcgtttctttttggacttgagaacgtggagcttaaatccggcatagatatagtgctaaacgcaatacagcttgacaaggaactgaaaaatgccgatatcgtagtgaccggagagggcaggcttgatggacagagcgccatgggaaaggtgcctgtcggagtggcaaaagcaggcagaaaaaacggctgtaaagtaatcgcactagcagggagtgtcactgacgatgcagtggcatgtaataaagaaggcatagatgcgtttttccctattataagaggggcaacaacgcttaatgaggctatggatatcaaaaatgctcaaaaaaatatgaaaaacactgcagaacaagttttcaggcttattgacatcagctcgcttatggaataatatatgttagtaaaattatgcgtggtgcaggggccggatgagatataaaagcctcgtatatcatagaatatttaaataaaaaaggagaaaagcaatggctaaggagaaaaaattagtagaggccatcacttccatggaggaagatttcacacaatggtatacagacgttgtgaagaaagcagagttgatggattattcatctgtaaagggatgcatgatctttaaacccaatggttatgccatctgggagaatatacagaagaatctcgatgcaatgttcaaagagacaggagtagagaatgtatacatgccaatgttcattccggagagcctgctccagaaggaaaaggatcacgtagagggctttgcaccggaggtcgcatgggtcacacagggcggacttgagacacttcaggagagacttgcagtaagacctacatcagagacacttttctgcgagcttttcagcaaaacagtacagtcacacagagaccttccaaaggtatataaccagtggtgctcagtagtgcgctgggagaagacaacacgtccattcctccgctcatcagagttcttatggcaggagggacatactgttcatgcaacagccgaggaggcagaggcacgtacagtacagatgttaaacatctatgcggatttctgtgagaaatatcttgcaatccctatggtaaagggaagaaagacagacaaggagaagttcgccggagcagaggctacatacacaatagaggctctcatgcatgacggaaaagcactccagtcaggaacctcacacaactttggtgacggcttccctaaggccttcggcatccagtacacagacaaggacaataaattacagtactgtcatgagacatcatggggcgtttcaacacgtcttatcggagctatcatcatggttcacggagatgactcaggactcgtgcttccaccaaagattgcaccaacacaggttatggtcattccaatccagcagcagaaggacggcgtccttgacaaggcatacgacctcaaggacaagctctcaaaggatttccgcgtgaaaatcgatgcaaccgacaagacacctggctggaagttcgcagcacaggaggttcagggaatctcaacacgtatcgagattggaccaaaggatatcgagaaaaaccagtgcgttatcgttcgtagagacacaagagagaaaatcgttgtctcacttgatgaggtaaatgagaagctcgcagaggtacttgagacaatgcagaatgacatgctcgagaaggcaaaggcattccttgcaagccatataaacgatgcacacgactacaatgagttcaaggcaatcgcagagacaaagccgggctttatccgtgctatgtggtgtggagacgaggcctgcgagaacaaaatcaaagaggacacaacagttacaagccgttgtatgccatttggtgaccaggagcagatttccgacgtatgcgtatgctgtggaaagccggcgcataagctcgtatactggggcaaggcatattaaaaggagaaaatacagatgcgcatagatttaccgcagaatgtcaacttcataatagacacgctctacgagcatggctttgaggcatatgcggtaggtggatgcgtgcgtgacagtctccttggcaggacaccgcaggactgggatatcaccacatctgcaaagcctgcgcaggtcaaagcgatatttgaccatacgatagacacaggtatccagcatggcacagttacggtcatgctggagcatgtgggctatgaggttaccacctacaggatagacggagagtacgaggatgcacgccatccaaaggaggtcacctttacctccaatctgaagctagacttagagaggcgcgacttcacaatcaatgccatggcatataatcacagggcagggcttgtcgatgaatttgatggcataggagatttaaaagcacatgtgatcagatgtgtgggctgtgcgcacgacaggttcagtgaggatgcactcaggatgtttcgtgcggtgcgatttgcagcccagcttggctttgatatagaggcacagactaaagcagccataaaagagcttgcccctgccttgtcaaaggtcagcgcagagcgaatccaggtggagcttgtgaagcttctgacatcagaccatccgcagatgatgagagatttgtatgagcttggactcacagcggtattcatgccggagtttgatgtgatgatgcagacaccgcagcacaataagcaccatatgtacagtgtcggtgagcatacgcttcataccttggagcatgtgcgagcggacaaaatcctaaggcttaccatgctgcttcatgatgtggcaaagcctgtgtgcattacgacagacgaggaaggccagaatcatttcaagaagcatccggttgtgggagctgatatgacaagaaagatactcaggcgccttaagtttgataacaggactacagactgttgctgtaagctggtaaaagagcatgatgaccgtccggccatcacggaacgcaatgtaaggcgtgccatgagccgcataggaacagagctttttccgctgttgtttgaggtgaaaagagccgatacactcggacagagcatgtataagcgcgcagaaaagcttgaatacatcgcagaatatgagcgtgtatacaggaaaatcctcgcagaccatcagtgtgtatccaaaaaggaaatgaaaataaatggcagcgacctgattaaaatgggagtagagccgggaccgaagcttggcgatatcctggacagactttatgagcaggtgcttgatgacccatcgctcaatgaagcacaaaaacttaaagagcttgcgaataaaataataacctctctcatatgattaaaaagcatctgaatagttatgatgcattaatcatatgaggggggatttttttgtataatcagccggaagtggctttggaaaaatatgagcttacagtaagcaggataataaagggcagaggagcatatatatgtgatacaggcatcgggcagaagctgctcgtgccgtacagagggcatgagcaaagggcatgcaccctgcgggatacgctggcatttatccagagaaacggtatggatgtggagcagatatcacagacaaaggagcagtgtatcatatcgcgagataactgtgaggacgcatacatattgaaggattacagagcaggcagagagtgcagcacggacagcatagatgatatgcgtggcggcagcagggcattagcgcagctgcacaatatattggaaaagtatcctctgccttcggatatcgaggtagaaagcctgcacgaaaaatctcagcgcaaatgtgcgcagatagtaaagcttaaaaactacatactgcgtcgcagcaagacaaatgcctttgaacatctgttttatgaatgctatgagagattcttagagcaggggcagaaatcggcggaaatattgtgtgagctggaaaatagtaaaacgtcggttccgatatactgccacggagccttcaaccagcacaatgtcgtgtatacacagtccggaagatggctccctgtcaatttcgagaccatgcatccgggatatccggaaactgatcttgcggagtacatgcgcaagatgctcgaaaaaaatcactgggatacagcggttgcagatgcaattcttgacagctattgcagcgtaagaagtcttgatgatacatcaatgagactgcttcaagcactgcttttgtttcctgaaaaattttgtaagctctgcaatcactatagcaactcgcgcaagtcatgggtatgcgaccgtgatgtggataagcttgcacagctcatacagctaagtggggagcgcgaggagtatctgcatgccctgcaagccatagtgtaagcagtaatgcatatatatagtgaatttaattgaaaagtaaatgactatgcgatatattattattgtagaaaaacgtttaaagccagctattaaaggaaatacagatgaagaaatttaaaagattattttgcatagtatgcatgcttgtgctgtcacttgcagcatgtggaaaacaggacacggatgatggtgtaaaaaaattctataacagcatgaatgatacgacggaggccgtgggagaaagcacgcagtccggtttgaaagctgctgcggaggaaaacggaaagtccgttaagaaaagtttagatattctcatagtatcggacataaacagtgccaacgagacgatcagggtatacaattactcgacaggagtgcagtatcagtattactatgggctgaccaccggctttttcgacaaatatggcaatcacatgtcagtttcagacatacatcagggtgatgtggttgacatatcaggggcggattcagacggcaaggcaaagcgtatacaaaaatccgataaggtgtggacaaacgacgcagtgaccaatttttctgtggataagaataagagcgtgcttgaaattggaaatagcagctacaggctgggtgagcgcaccatgatattttcaggctcggatgtcatagatactgacagcctcacggcgcaggataagctggctgttgtcgggattgacaaggatatagtgtcaatttctgtcacgacagggcacggcacactgcagcttagcaatacatcgctgtttgagggcagctttttgcagctcggagacaggatatttgcagaaatcactaaggatatgtcgcttgatgtgccggagggcagctatacgctcgctgtggccaacaacggctggggaggcagcacggatattgagataaaaagaggcgagactacaaaggtaaatttaaatgatttaaagggtgagggtcctaaaaagagcagcatccttttcgaggttgacgtgcagggagcaaaaatatatgtcgatggcagtgaaatcgactatacgagcccggttgagataacatacggaaaacacacgcttaaggtaacagccgatggctatgacacctggacgaggacgctttacgtgaactcaaaggaggccaccatacagattacgataaatgacgatacggacagctctgcaaacgattcatcaggtaccaaaactaacagcaccggcagttcacaagccaccgcacagacaccttccgagacagcctcagagagggctgatgagaaggacaatcaaagtacatctcagggcagcaccaccggcagctcgcagagtacaaattcatcacggggaaccaacaataaatcctctgacagttccaaaaatagtctgacaaataaggacatatccgattatctttcaacattaacctctttattaagttcaaagtaaggttttaagaatggtaaaagtacataaaagcctaggaaatagcgcattttccttgacaaaccccataaaaacaagtatatatattcttgtaggtaatttgggaatacagctcgaattatataaattatgaaaatccagaggaggaattttatcatgaacaaagcagatttagttgcagctatggcagagaaggccggagtatcaaagaaggatgcagaggcatctttaaaggcattcacagatgttgttgcagaggagttaaagaaaggtgagaagatccagttagttggattcggtactttcgaggtatctgagagagcagcaagaacaggaagaaatccacagactggcgctgagatgacaattgcagcatctaaggctcctaagttcaaggctggaaaggctttaaaagattctcttaactaataagttagactatcacggagtagaagaatgggtgaagcctttaaggctccgcccatttttggctatatccactgaaatcagggtaatggttatgaattgatttattataggtaagacacagaggtaacaatgagattagacaaatttttgaaggtatcgcgtctgataaagagacgtacagtggcaaatgaggcatgtgacgcaggccgtgtcacagtaaacggcagaccggcaaaggcatctgtaaatgtcaaggtcggagacataatagagatagcatttggacaaaagacagtcaaggttaaggtgttaaatctccttgacacaacaaagaaggaagaagcaaaagatctttttgagtatatataggttatattttcatgaatcccggcatatatttacatatgcgattccacagatggcatgtatatgtgcggctgtctatggagcatattaaaaattatgtgagggacaggaaatggaagaaatatcaggcacaaagagtcataagcttatcttgaataatcgcagaacaggcagctttacaggcattttggatgtgctctcctttgatgtgggagagatacttttggagacggagctgggcatgcttgacctaaagggcaaggatcttcacgtaaacaggctaaaccttgagaagggagaagccgatatagaaggtgagatagacatgattacgtattcgaaggtaccggaggtgaccggaaagaaagataaaatgtttggcaggatattcagataagcacctaaggaggaataatgagtaaacgtcgtgcaaagagaaggggcggaactttaagtgtttctatcatagttatagcatttcttgtggttatggtagtccaggttgtgcagctaaagcagaaggaatctacatatgccgcacaaaaagcggagcttgagaagcagtatactaaagaatcggagcgtgctgatgagatagaaggcatgcagcagtatatgcagagtgaccagtacatagaggatatagcaaagagcaagctggggcttgcgtatgacaatgaaataatcttcaaggaaaaggacaaataatttttgaagatatagttgcgctttttcgtcaaaaccttcatttttgaccacatataatcgttgaaaaaagatggaggcaaaaagatgaggattgcaaatttaaaaaaggctgtgtgggggcttatggcatttgcatccacactggtgtgtgtgatggattgttatccgctgatacctgcagtgtatggagtttattgtctgagtagtggacatacgattattttttacataggattaattattggaatgggatactttatatcgataccgtcgatatgtaagtatctctttattattgcggtgatttactttggggaaaggctatttgtgagaaaaagcagtaaaaacggatgtctgacaacagccgttgtagcagcttgtgccacggcggtgatgaatctgtcggtaacatttctgggaaggccggatacggatgagatagtgttgtcggtagcagagagccttgttgtgttttcgatggcctttgcgctttgcagagcatgcgaatatttaagggctcttgagcacaatgaaaacccggtcatagcaggacttctgcccgacagggaggaggcatttgccacagcagtttctggactttcaggcattatttcgactgcaaatgtcatggctgtaaaatgtacggcagataaaatccctgatgagagtgagaaaatacagcttgaggtgacagggagactttgtgcatgctgtgagggctgcagtgtgtgctggacaagcgggacttcgatttccgacagtataaaaatgcttgctgatgcagtgcgcaaacgtatgaaaacagaggaaattgtgcaaaacagatatgtggatggctgcccgcactatacgcgcatggtggaagccgccacagaggcatttgcccgtattgagctaaatgaagcctggtacaggcgtctcacggaaaacagacgcgtcatagccgcacagcttgacgctatggcagagctcatggatagctggtgcagggctgaaaaatgtattgataaaaaaagaaggctgcgtcttacaagagtttatgtatatacaaaagaggctggtatacaggtggaaaatgcccatatttatgagaacgcaaggcagcaggtatgtataaaggcagatgtctgcaccaagatagatggcgggattgaaatttcaaagtatgtgcaggcggtttcacgcgccatgggagtgaagctcaggcaggcacatgggacagtttcaataatatccgatgagaggacatctattgtgctttacgaggagaatcagttctatgcactttcgggggtggcgaccaaaaaaaagaccggctctcaggcaaatggcgacagctgcagcatgtttcagctggatgatggcatgtatcatgtatgtgtatctgatggcatgggctcgggcaagcaggcgcaggccgagagcacactggtggtggatttgcttgaaaagcttttggaggccggctttagcagggaaagtgccctaaagctgatgaactctgccatggtcatatcggcgggcgaggagtcctattccacggttgattttgctacgatagacatgtacacaggtgagcttgagctggccaaaacaggcgccgcaccgtcatttatcaaatcagggaaacaagtaagtgttatagaaaatgaatccctcccggcaggggtcgatgtctggcaggagagcaaacattcaaaaaatacacttcaaagtggcgatttccttgtcatggtaacggatggtgtgctagaatatctgcatgtaaaggacagacaggggaagcttatggatatcatcgcaggcgtcaaaagtgacaatgcaggcgtgatggcgcaggaaattctggacagggtgctgcttgacacaggtggatacgccatggatgatatgactgtagttgcaataggaatctgggaaaaataatgattagacggacaaaagaatatattctggaaaacaaaatgataaaaaatcacagcacggtgcttgttgcgctgtcgggcggtgcggattcggtctgccttctgctggtgttaaatgagataaaaagacagtgcacagatgagcttgattttgcgttggaggcagtacatgtggagcatggcatcagaggagccgagagcagggaggatgcgaggtttgcgtcagacctttgcgagaggcttaacataccgtgccatgtgcattctgtggacgtaccgcaatatgcagcaagtcatggactcggactggaggaggccgccaggatattgcgctatgaagcgtttgaaaaggaagtcaccactgcctatgcagcagaccaaaagcagggtaacagcaggcaggcagtcgttgcagttgcgcaccatatggaggacaacgcagagacagttctttttcagatgcttcgcggaagcggagcgaagggactcgccggcatgcatccggtttccgtgaagaacggtgtcacctatatcaggccgcttttatcagcaacacgcgcacagatagaggaatatctaaaggaaaacggacaggcttttgtcaccgatgccacaaacactgacacagcctactccagaaataagctgcgccatgatgtgtttccactgcttttgcagattaatgacagggcgattgagcatatcaatgagagtgcaggacagcttgcggtgatgaatgatttttacgagcagcagctaaaagaggcgtgcgacagcatggtttcaaaaaaagaaggcagggtgatacttgaaatcagtcgctttgagagtctgcatccggcattaaaaagcggagtggcacgcgagtgtatacatctggcatcagggcggctcaaggacatcacgagcacacatatcagtgcacttgtgaagcttgcagggcagcagtcgggcagaaaaatcaatctgccatatggaattattgcggaaaaatcatttggcgaggtgatactcttcgccggaaggtgtgacgatgaaaaagaagaaattcacattacgcaaaaagagcttgaggcactgagtgccacgggagagcaaaaaaacataaagctttcggcagatggctcgtatgtcacactttgtatacaagattttaatggtaaaatggacgaaattcccaaaaaaccatatacgaaatggtttgattatgataagatgaagaaaggctttgaaataagaacaagaaaagccggtgactatataattgtggatgacgagggccatcataagaagctgaagcaggtatttacaggtgataaaattcctgcacagcagagagcggggctgtggctcatagcccatgaatcactggtgcatgccattatcggatacagatccggctgcagcgcacttgtcacaccacagacaggaaaagtacttaagatcacattttacggaggaaaacaaaatggatttttcaaaaaaatatgatatttcggtttacctgacagaggagcagctcaataagcgtattgcagagattggagcgcaaatcacagaaaaatacaggggacagtcagtatatctcatttgcatactcaagggctcaatattctttaccactgagcttgcaaagagaattgatttgcctatgactatggatttcatgtcggtatccagctatggctcaggcacagagtcatcaggcgatgtcaagattaaaaaggaccttgagcattctatcgagggagagaatgtcatcatcatagaagacatcattgattcgggaaatactcttagcaggctttcaaagctccttgccaaaagaaacccgaagagtctcacaatctgtacacttttggacaagcctgagcgccgtgtggttgatgatgtaaatgtagactacgtgggctttgtgattcctgataagtttgtggtaggctatggccttgactatgatcagaggttcagaaatctgccttacatcggcttcgtcgagggcgaaataaaataaaaaggagaagtaaattgaataaacaaaaaagtggtatgcgcggaataggcgtatacattatcattgtatttgcagtaatctgcatctggtactggctgagcgccggggctacatcaaactcttacacacagagtcagttcgagaaggatcttgacaagaatcaggtgaagagcgtaaaggtagtgcaaaacagggagataccgacaggaagtctggaggtgaagttcaaggatggcacatcaaaggtgctttatgtatcagatgtaaacaatatcgaaaagaccatgacaaaagcagggtacaccgactatacagttgcggatgttccggctgaaagctggattatgacactgcttccgtatcttctggtattcggagccatgttcatactctttgcagtgatgaacaacaacgcagcagcacagggcggcggtggcaagatgatgaacttcggcaagaaccgtgcgaagctcaccacacaggaggagaaccatatcaagttttccgatgtagcaggcttaaaggaggaaaaggaggagattgcagagatagttgatttccttcgtgatcctggaaaatacaccagacttggagcaagaatcccaaagggcgtccttcttgtaggacctccgggaacaggtaagactctccttgccaaggcagtagccggagaggcaggggtaccgtttttcaccatttcaggttctgatttcgtggagatgttcgtcggagtcggagcctcacgagtgagagatttgtttgaggatgccaagaaaaatgcgccttgtatcgtatttatcgatgagattgatgcagtagccagacgacgtggcacaggaatgggcggcggacacgacgagcgtgagcagacattgaaccagatgcttgtcgagatggatggctttggtgtcaatgagggcattatcgtcatggcagccacaaaccgtgtggatatacttgaccctgctatcatgcgtccgggacgtttcgacagaaaggttgtagtaggcagaccggatgtgggcggcagagaagaaattttaggtgtccatgccaagaaaaaacctcttgcagaggatgtagacttaaagcagattgcacagactacagcaggcttcacaggtgcagaccttgagaatctgatgaatgaggcagcaatccgtgcagcgggcgaaaacagagaatatatcacacaggatgatatcagaaaatccttcgtcaaggttggtatcggagcggagaagaagagccgtatcatctctgacaaggaaaagcgcatcacagcctaccacgaggcaggacatgcaatccttttccatctgcttccggatgtgggacctgtatacacagtttcaatcatccctacaggagcaggcgcagcaggctacaccatgcctctgcctgagaaggatgagatgttcaacacaaagggacgtatgcttcaggaaatcgtagtagacttaggcggtcgtgtcgcagaggagcttgtgtttgacgatatcacaacaggtgcatcacaggacatcaagcaggctacaaagcttgcgcgcgagatggttaccaaatacggtatgtcagacaatatcggccttatctgctatgccgatgatgaggaggaggtcttcatcggacgagacctcgcccatgcaaagaactacagcgagggcatagcatcggcaatagatgtcgaggtgaagcgtatcatcgacgagtcgtacgacaaggcaaagagcatgatagcagagtaccgcgatgtgcttgacagatgtgcagcacttcttcttgagaaggagaaaatcacaagagatgagtttgaagcactgtttgatgaggacagcaaaacagtagttggacataatatttaaaaaacaactatgtttttgtacacaatcactatatgaaaaatattaaatatgactaaagcactatacaaattgcataaaaacaacccacgatttttatgcaatttgtgaacacttatcgttataaccgtgatattataataaccgtaaaaaccccccaatacattatatagtttttgctataccccatagtaaaaataccttctcctaaaaggcagccgatcgtaggctgtcttttttaatttctatgttatagctacaaagtaagggattgtgtgcccgggatggtgctttggtgggggattgatgcccttactggagcgcatagcgaagttgcttagagtctgtcagaattatgcttagaggagcagaaatgcccggccatggacggctgggcaaggcgttatgcgccatggacggcgcataaaagccggtttcgtcagtcatagaaagattaaaagcataattcctacagactcttagcagcgtagcgtagcgaaagcgagggcatcaatcccccaccaaagtatcgtccaaggcgcgcaatccacgtattaaagaaaataatttggttacgataaaatatgcttgcataatcacatctgttgtgataaactatgcaagtatcgtaattgaatacatgggcagattcccgagtggccaaaggggacagactgtaaatctgctgcaacttgcttcgatggttcgaatccatctctgcccattaaaaaacctcaagtcgtatgacttgaggtttttgtgttattctgaaattatcatttaatcggcctgcgccccagtggcggtaagcacagactcccatgccatcgtatcaggccagtcctttgtatcaaagccatcacggatacatctgttgtagtagtccagcttgtttcgtatcggcgaatcatctgtgaatcttgcatcatcatagatgccgttaatataatcatctatcgcggttccgaatatttcagagcggtcctctgttgcaaaggtcatgccgtaggaatcaatgaaatacccggatatgtggctcgatggatcatccggattgtagtttgcgtagctgtcatcataggagaagctgtcaggattaaaactgttccatttctcttcggaaaactcgctcttttcatcgtaggtgtgtatgaatgtaagcttctggtcaatcagatgggaaatctcatggcctacagtgtagctgaaatcccagctgtagttgcagtttagaactattacattgtggttgtttattatatttacgaatccacttggctcatttatcatatctgagtggcctgatgaaatatcaccgcacagatagattcgcatgcctcttatatcgccataacacagctgtgtgaaaaagtcatcagggaaacagtcaagtatttcctcaagcgaatccagagcgatcgacagcttatccttgttcttgaattgatggatatcgtagtaatcaattctctttggcacctcaggcccgaaatatatggaaaagccgtatttctgttcaagggctgtgatacgtgcatttatgtcggataaatcaccccagtcatatgacgcggtgtcggggaccagagtgacctcatcgccgtatgtattgtagtcggaatccttcccggcctcttccatagcttcctgattttcatcggtactgtcagaggagtctatggcagaatatggggatacatatgagccatcatcgcgtaaggcctgtagcagtgtatcacagtcattgtatgacgtgatttcggctttgctgtcattcttgcccttgtcgagtgaccagatgagaatttccgggttgcactgctctgtgtacaaaagcatcatcacacagtttgcatcaggcagatataccgagttggcagaacagtaggtcttggtatcggctgccgcagagtcggatgagctgtcggacattttgcctgtgcttcgtgttgccaggttgtatgaaaaggatgaactgacaccggtggcgggtgaatatttatagtaactgatgatgttgtccgaggataaatcctggcatcgtatgagcatgtcaccatcctctgccaaagtcacatccaccacatccggcagtgaaaaaaagctgttttctccatcggatgaatgatagttccaaatattgttggccgtatctgcctcgattacaaagccctttgagtcgacacatgacatggaaaaactttgtccttcgtaggttgaaagcactgtgttatcgtcaagccttatatcagagacggcatatttgtaggtatcgggtgtgacacctgacacgagagcatattttccgtcagcggaggtggcaatctgtgagacatcataataattgccgggattcggcacatcgccatcatcagaatctgatgtatcgcaattgccatcatagtcctcaggattatatttgcaggtttttatctcttttaaatccttatcatagattgttgccctgccggcatcggaattgatgagccagagcctgtcaccttttatcatgtagtcatcacagtcggttttgtcgtgagtgaggcttgccgtgatttcattggaccagggattatatacatcaaatgaatactgaacagattgatcatcggtctctatgatggaattattgtagctgccctgtcctaccataaggatgttatcaccaaactgtcttgtatcattgtacggctgcccctcaaaggcgacattgtgcaggatagacagattgctgcttcctttaacacttgtggtatcctcccaaaacgcaggtgatttgtgcagaatagcctgcttttgtgcgggactcttaaatagataagagacatccgaaaaagagcaggctgtcatggagattgcactgaaaaataccagcgaatatgtaattaaagtggttacatgtttgcgtttgaacaattttgactcctttggaaggtggtgtatatgcaggctattcctcagcagcatgtgcggtggaaactcgtgcagtagattctctttcaatcagcatcggacgtagctgtgtgcggctgattggaatatggtgaatgagcgaattcaatataatatatgcacagcggcccagatcattacgctcctgtctgatagtggtaagaggaggggtaagggctgcggcaaacttgacatcgtcaaagcctaccacacttatatcatttggcacattgaagccgtgcagctggcactctaagataacaccctttgcaatagtgtcgcttccgcagaggatagcggtggcacctgctgcaataaaatttgaaacgtaatactgtgcggtttcaggaatatagtagccgtgtcccatgagctccgggtagatttcaagaccggcatcgcgcatagagttttcaaaggcttcctgacgctgatccgaaaccagggaaaaaagagaaccattgataaaggcaatctttttatggcccagattgtgcagatgctttacagccatgtcaatgccctcgtagctgtcggtgcctacataggctacattgggattgttttctatatagttatcaaacaaaacggtaggcattgtagtatttttgagctgctgcatccattcatcgtgaagagcaaaacctaccagaaatgcgccacaatagccattctttaatatatatgtatcatatttttcttctgcctgaagctgaggtgtgacagggatgatgtccacgtcccatttgtgcttaaaagcattctgtttgaaaccaagcactacatcatatccgaactcatcgatagactcgtagttcatattttcaataaacagagccagcttgcggttttctacctttctggagcgctttgtgctgtagcccatttcgacagcagtgtctaaaactgtctgacgaagctcctcacttatatcgctggcaccatttaatccctttgaaacagtgctgattgacacgcccagccgggcggcaatatccttaatagtagccatagtatttgtcctttcttatgtgataattaaattatacatttactatcagaaataggcaatattttctgtaataaatttttcgaaaaaaatctttgaaactgtggtaataactaccaaaaaatgaatgtaaattacgtgaaaaatggcaaaaatgagtttaaaaccactaaaaagattgacaaatctgacaataggaaataaaataatctcagatacgaaaaaaatagaaaattttaggaaagaggaatggtaatttggaggccagagaaaatctcagaggctccggaatacttctttcaatctcgagtctgccgtcaccatatggtataggtactcttgggagagaggcttacaattttgttgatctccttggtgatttgaaacagaagtactggcaggttcttccggttggccccaccatatttggcgatagtccatatcagccatcatcaggctgtgcgggcaatatctatttcatagatttagataagctggtagatgaggggttgttagagaaggaagagatcctggggtataactggggcacagacgaatcagaaattgattatgcagcattgcatcagaacagatgcaagattttacaaaaagcgtttgaaagatttgatacaaatgcacaagagtttcaggattttgtaaaaaaacagtcggagtggcttgaacaatatgcattatttatgacactgaaaaccgacaatttatacaaaaattggagcgagtggtcaagcgagtatagaaatccgcaaacggttgcgcttgaaaagtaccaaaaaaagaattataatacaattactttttgaaagttctgtcaatataaattcttcgagcaatgggaggatttaaaaaattatgctaactcaaaaggtgtctacataataggtgatatctcattctatgtaggatatgacagtgtggatgtgtgggcagagagacaactctttatgatgagcgcaaacgatacaccagagtatgttgcagctgccggtcctgataagtattcagagagcggacaggtgtggggcaatccgatgtatgactgggatgccatgaaggaggacaacttctcatggtggagaaagcgaatgcgtgtatgcagagaactttttgatattgtcaggattgatcatttcgcaggaattgtgaaagcatatgcggtaccgtacggacaggataagagcctatccgggaaatggttcaagggaccgggacgcaggcttgtcaatgcaattaacgaagagcttgaaggggttaatgtagtggctgatgattatacatcagcaagccttttaccgggagtgaaaaagctccttgcaaaatcgggctggatgggaactaaggtcatgatgttcgcttttgatggtgatccgacaaacgaatatctgccacacaattataccgattcacatgtagttgcatatattggcacacatgacaatgagacgatagttggttcattcagtgacaagacagattatgagcttgcttatatgtatgagtatctgaatattgaaaataaatcacaggttccaaatgctcttatcagggagctgtatcacagcaccgcagagctggcgatagtccagatgcaggatatattagagcttggaaatgaggcgaggatgaattatccttcgacagtcggacataactggagatggcgcatgacaagtaagccacacagattggacaacgaaaagatagcctggattagaaacattgcggtggtttaccgcagataattaatttgatataagttgcacggcaatttatatatatacttttttacattttatattcaaaaaggagaggaagatatgaagaagaaagtattagcatctttactttgcgcatctatggtagcaacaatgtttgcaggatgcggaagcagcaatggaaatggaacagagaaagccgacaagaaggccggcggtaaggagaccattacagtaatgggaccttcagaggatttagatgatgcaaagggtgcttggctcaagacagagtgcgaggcatttgctaaagcaaatcctgatttcaacatcgagttcaagtatgttacatcatctgagagtgatgcaaaggacgttgttacaaaggatcctaaggcagcagctgatgtttacatgtttgcaaacgatcagcttgagccattaattaaggctaatgctattgctaagttaggtggagaggcagcagattatgttaagacatctaactcagaggctatggcagcaactgttacatatgatggagacatctacgcagttccttatacatcaaacacatggttcatgtactatgacaagagagttttctctgaggatgatgtaaagagccttgatacaatgcttacaaagggtaaggtttcattcccatttgataacggctggtatctcaatgcattctatgcagcaaacggatgtacaatcttcggagacggaacagacaaggctgccggatatgatttcagcggagataaggcagtagcagttacaaactacatcgtagatttatttgcaaatccaaacttcgtaatggataacaatgagggatcacttggtcttgctggacttaaggatggttcagtaaacgcttacttcaatggtaactggaactatgacgcagttaaagagaatcttggtgaggagaacgttggtgttgcagctcttcctacaatcaatattggcggaaaagactgccagttaaaggcattcttaggatctaaggctatcggtgttaaccctaactgcaagaaccaggaagtagcagttaagcttgcagcattccttggaagtgaggatgcacagcttgctcacttcaagttaagagcacaggctcctgtaaacaaagatcttgtaacaaacgaggaaatcgcagcagatcctgtagcagcagctatggctaaggtttcatctgattgttcagtagcacagcctatcattgatatggcaggttactgggatgcagctacaccattcggtgatgctttccagaacggtgcagaaggccagattacaaaggacaatgcagctcagaagacagaggacttcaatactcagcttaatgattctcttaaataattaagtagatcagattatgattccaaggttccgggtagccggaatcttggaataaattagtttaaaggaatggcatatataatgcatgccaggaggaaaagtatgataggagcaaacaaaaagaaaaaagtttcggaatttgctactccgtatactgttggcaatgccctcacaaaaggcggagctacagttaagctatcggcactcgtaatgggtcttgccaatatggctcataagcagattataaagggtctgatttttcttgctatagagattgcatatatagcatatatggttagcgctggtgcttattacatttccatgctgccttcacttggctggagaaaacaggaagaggtatttaatgagcagaagcagatttatgaatatgttgcaggcgaccagtcagtattattactgttatatggcgtcataacaattgccatcacagtattatttatttacatgtggtgcgagaatttaaagagcggatataaggcagaatgcctttcaaaagctggaaaagaaatcaattcttttggcaaagatgtcaaggatttatttgataaaaacctacataagacacttatgtttctcccacttatgggaatatttatttttacagttttaccattgctgttcatgattccaatggcctttacaaactattcagtaaagggtgatcatctggtattgttcgactggacaggctttgcctcattcggacaggtgcttggacttggtggtaagcttggtaagatattctggagagtactcggatggacaatctgctgggctgtatttgcaaccttcctttgtaacttccttggactccttcttgctatcgttatcaatcgtaaagagacacattgcaaggctttctggcgtacatgctttgttatctcaattgcggtaccgcagttcgtatcactccttgtaatgagacagatgttccagccacagggtgctattaataacctgcttttggagtggggttggattgataacccgcttccattctggaccaacactatgtgggcgagagtttctgttattctcatcaactgctgggtaggtattccgtataccatgcttcaggttacaggtgtattgcagaatgtgccttcagagctttatgaggctgcaaagattgatggtgcaaacgcagcacagatcttctttaagatcacactcccatatatcatgtttatcatgggaccatatatcatcacacagtttaccggaaatatcaacaacttcaacgttatctacctgttatcagcaggaaagcctacacctgtcggagacagtgcaggaaagacggaccttctggttacgtggttgtacaagctgactattgataatcaggagtacaatatcggtgccgttatcggtatcctcacattcgttgtactttctatcgtagcgcttgttacatacagaaatacaaaatcatacaaggatgaggagggattcatgtaatgagtagtgtagcaaaagcaaaaagacctatgtctgccggacgtgctaagaaagtagcaaagaattcccttgttcatatcattcttggaatacttgctgtagtatggctgttcccaattttctggattattatgacaagctttagagctgagagtggtgcttatacaaagtacttcttcccacatggccttacatttagcaattatacaaggctgttcacagagactacactgttgaatttcccgagagcattttttaatacactgtttatttcagtgttctcatgtatcatttcaacagtatttgtactttctgttgcgtattgtatgtcacgactgagatttaagatgcgtaagcctttcatgaatctggctatgattcttggattgttcccggccttcatgtcaatggttgccgtatactttatcttaaaggctatcggacttacagagggcagtatgcttcgaatttcattgattctgatttactcagcaggagcaggaacaggcttctatatcgcaaagggattctttgatactgtgcctaagtctcttactgaggcggctatccttgacggatgtacacagttccaggtattttacaaggttatcctgccactcagtaagccaatcgtagtatatacagtacttacagcattccttgcgccatggcttgatttcgtatttgtaaaggttatcgttggtccaaacgacaagtattggacagtatctcttctcctttacaacatgcttgagaaagagtttataaacggatggttcacaagatgggctgctgctgcagttgttgtatcaatacctatctcaatacttttcatcatcatgcagagattctacgtggatggacttacaggagctgtcaaaggctaatttggttttatttaggccgctgcacttttgtgcggcggcttttggtttatattgggttgtggcaaactttgggggtgtgtggcaaacttagcactttcaggttgtgtggtgccggtgtggcacacagtgctaagtttgttgctactttgtggaagatgtgagaatatgtgtagtgattttgtagatacaaatttgctcagaatttagttaagaaaaggagtgcgtatgattaataataaaataggcggccgcaatatggtcggcagggctgtgaatagattggcgggcaggttgactgctgtggcattgacggcagctatggcggtgtcgatgcttgcgggatgtgctgcgggtggaaagaataccgagacggcagcaaagaaggagtacaagccttctgctatggagcagatgaatgcgaaaaatgatcctaatgtgattcaggacaattacaggacctgctatgaggtgtttgtatacagtttttttgacagtgacggtgatggcattggggatttaaagggacttacagagaagcttgactatatcgagggacttggctgcaatgaaatctggatgatgcctattatgccttctccttcataccacaagtatgatattacggattatatgaatattgacaagcagtatggtactctggatgattttgatgcgcttattacggagtgtcacaagcgaaacatcaatgtgattattgactttgtaataaatcacacatctaacgagcatccgtggtttaaggcggctgctgattatatcaagtcgcttcctgatggggcagagccggattcttcggaatgtccttatgttgattactataattttagcaaaaccaataccggaggctacaaccagctgccgggcacgaattggtattacgagtcacagtttgtagacagcatgcctgaccttaacctgcagagcgaagctgtaagaggggagattgacaaggttacatccttctggcttgaccgcggcgtagatggctttagactggatgctgtgatttattacaataataataaccagaccgagactatagatgacctcacatggcttgtaaacaatgtgaagagcaaaaaggccgatgcttatatggttggtgagggctggactacatacagagagtatgcgaagtactataagagtggaattgacagtatgttcaactttgatttttcacagcaggatggatatattggaaaggtgttaaatggtgcagcaaatcatggtgccagcacatacggcaatgctttggttgatgtggaaaatgagataaagaagtatacagactcatacattgatgcaccgttctatacaaatcatgatatgggacgcagcgcaggatattacaacggagataatgccgaggagaaaaccaagatggcgcaggccatgaatcttcttatgcccggaaatgcttttttgtattatggagaggaaatcggcatgagaggcacagccaatgatgagacgaaacgtcttgccatgagatggagcggggattcaaaagctaagggaatgtgtgtgggacctcagaatgcagaagaaaccgagcagacatatgataccctggataaacagatggagaatccatactctatttacaactttgtgaagcagacaatatcaataagaaatgctttcccagagatagcacgaggtacaaatacctttgaaaaggatctgtcaaatgataatgtgtgtatattcacaagagagtacaatggtgagaaagcagtgcttatatttaatccatcaaaagatgaagcaagtgtggatgtgtcatcgcttggagtaaatgatgctgttgcaatgcttcagactacaaagaaagcaccgtcatataaggatggaacggcaaagctgccggcgtattcggtgcttgttttgaagtaaaattattaaattatataattaaattgagggatgatttttaaagcgtgcgcaattatacaattgcgcacgcttattttaatagattttgacattttgcataatttgtgagttttaagttgagataataatgacgtagcattaattattaaaaaaatgtaatattttaatatcaaaaaaggaggattcatatatgaagaaaattagaaaagaagcactatgctgtattctgttacttgcgataattatttcgtcaattccaatgaataaagaaattatcaaggcgtcatcagattcgtatcttagtgtgcgaggagtggatttatcaagcataatagcatttgaaaaatcaggacagaaattttattacgaagatggaaaacaaggggatatttttgatattttgaaaaattctggagtaaattatatacgggttcgtgtgtggaacaatccttatgatactgaaacaggattaggatatggcggaggaaataatgacatttggaaagccatagaaataggcaaaagggctaccgaaaagggaatgaaggtttttgtggattttcaatattcagatttttgggctgatccagcaaaacagtatgcaccaaaagaatggaaaaattattcaaattcacaaaagatatcgtcgatttatcaatttacttttagttcattaaaaacgttgattgattcgggaattaacgtggggatggtacagattggaaatgaaacaaatggttctatgtgtggaatgggtggattatatgatggagtgtggaatttaacatctggtgtaggagatggattgaaaagtggatgcaatgcagtaaatgatattaataaatattatggttattcagattccaaaaagatacttcgtgtattacatttcacagatccaacaacaacttctgaatggtatgcagagcaggttagaaatgtaggtgtagattatgatgttttgtctgtgtcagcttatccattttggtttgggcatgcatctgatttagcatctacattaaaaaatatttctgttaaatataataagaaagttatggtagctgaaacagcatatccttatacttttaacaatgctgatgatacagtgaataatattggctctaaagaagatatgacatattgtgattatcctattagtgtttctggtcagaagcaagctattagtgatatttttaatgcggttgcaagtgttaatagtatagaaaaaacaaaaggatatggacttggtggattttattgggaaccatcttggataggcacctcaaaaagaattagtgattcttgtggaactggatggagttcatcagtttcagaaaattatgagaatttgtttgtattaaatggttctcaatatgctacatctgcacaaggaagttcgtgggataacatgactttatttgataaaaatggtgttgcattacaatcgctgcaaatatttaatgattttaaaaaatgataaggaatagagaacaatatgaaacagttatgtggaaaaatgaaaaaaagcagagtgcttttgtgtatgttgataccagctttggcatatgtaattatattttgctatttaccaatgtcagggatagtacttgcgtttaaagatttcaagtatacgctcggaatatttaaaagtccgtggtgtggttggagcaattttcaatatttatttgtatctggaaaaatatggagccttacaagaaatacgttgctatataatatagcatttatatttctaggattaatatttgaagttggatttgcaatattgttaagtgaaattaataatgttgtatttaagaaatttgctcaaggatttatgtttctcccatattttatatcatgggttgtggtctctacaattatgttaaacatatttggagataatggagttttaaattcagtattagcacattttggggtgactgattttagtatatataaacaagttaacaaatggccgatagttttggttttggtcagattatggaaacaaacaggctatggaactgtggtatatcttgctgcaatagcaggaattagtaaggatttatatgaggcagcatctatagatggagcatctatttggcagaaaatcaggtatattacattacccagtttaaaaccaacaattatgattatggttttacttgcattgggaaatgtatttagaggtgactttggtatgttctatcaattagttggatcaaatcagttgttgttgaagaactcagatattttggacacatatatatatagaatgttgactacatcacctaatgttggacttacggctgcagcaggcttgtatcaatctgttttatgttttgtgacaattttagttgcaaatggaattgtgaaaaaagtagatcccgattacacattattctagggaggaaaagatgattaaaggaaaagatcaaataatttttaatatattggcatatgttttggttggtttatttgcagttgcgtgtttgcttcctttttatttgatagttacaggctcgttaactgatgaaagtacgatagtgaaagaaggatacagtttttttcttacagcaaaaaatatctctacagaagcttataagcttgccctaaaaaatccacaaagtattatacatgcttatggtgtgacgatttttgtaacgataattggaactgtactttcaattattatgactactatgacaggatatgtattatccagacctgatttcccatggagaaatggtgtttcttttttcttctttttcactactctttttagtggaggactggtgccatggtatttgttgtgtacacaatatcttaattttaataatcatatttattcacttattattccgggattattttcagtgtggaacatgattattgcaaaaagctttatgaagggaattccctttgaaataactgaggctgctaaaatagatggtgcaggggatttctttatatatatgagaataattttaccaatggctaagccacttgtagcaacattaacgttatttattgcacttgcatactggaatgattggtataattgtatgttgtttatgagtggaagtgataattggaaccttcaatacacattgcaaaatatattgaatagttcggaagcgcttaaaagaattgctaatcagacaggaatgcaggtaggacagatgccgtcagagggactgaaattggctatgacagttattgcaacaggacctattgtattactttatccttttttgcagaaatattttgtgaaaggattaacacttggtgccgtaaagggataataaccttttagacataaaatgattttaggaggaaaaaatgaaaaaacaaattgtaacgaaaatggtgagtgcagcactcatcgcaggaatgaccgttggattagcaggttgtggaaatggagaaaaaggatcgtcacaatcggctgcagattcaaggacgaaaatagagagtgatagtccatatgccaatcaggattttgatttatcaaagcatgaaactattgtaatgtatgtgcttggggataaacctaaagatatggatgaagtacttgataaagcgaatgcagattattttgaaccgaatcttaatactacattggatcttgagtttttaaattggagtgattatagtacaaaatatagtttgcttctagcaggtggagaatcagttgatcttatttatacagcagcttggtgttattataatgacgaggtagcaaataaagcgtttaaagaacttgattctgagtggttaaagaaatatatgcctctttcatatgagttacagccaaaggaaagttgggatgaaatatcaatagatggaaaaatatatgcagttccgaaggcaaaatcgacatttacagcgtataatgtagtggctgccagacaagatcttattgataaatatggactaacaaaacctgattcttgggataattatgtttcttatttaaaagaacttgcagagaaacagggagaaacaggtgttacagcattaaatacaaatgccaatagagaacaattgctgacagtttatggacagtcgaaaggtgtgcaaggcgttacagagggatatgattttgaatattatgcaaataatagtgatgcagctccaacaacggatgatatttggtatctgtatacttctgatttttacaaagattactgtaatgagatggcagaacttgcatcagcaaaagtttggtcttctgatgcaataaatgatacaagtgatgctcaagcttattttgaaaatggtacaagtggctcatttgtatggaattcatctgtgtttacagcaggaaaaaatctcgaaaaagcacaggctggaacatattcagtatatgatgtaacaccagatgtgaagagaactcgtggtagttattcaacagatgctattgcgattacggaaaaatcggaagatccggagagagcagcattggttttggattatatgaaaggtgatgtgaaccttaatagactgttattggggggaatagaaggaaaacactattcacttgattcagatggaaatcgcacaactcttgatggcgcagaaggttatggttggaataactgggcatgggcaataaatcgtcaggatgaaccagatgaagcgggacttgatgagcgtgaaattgctgtgaataagcacaatgatgaaatggaatacattccaaagcagacaggatttacatttgatccttctagtgtacaaactgagtttactgtggtacagtcaatagtagatgaatacaagatggcattttctcttggaatttatggagcagatacggaagctacatttgagtcttttaaatcgcagcttaaggatgcggggatagataaagtactcaaggaatttgattctcagtatgatgcatatatgaaaaataaataataaatgatgaggatttatatggaaagcaaacctataccgataaagcaaatagcaaaggatttatcaatttcatccactacagtatctagggcactctctggtaaagggagagtgtcagaggataccagaaataaaattatagaatatctggaagagctgggggcacagcctgctgtatacaatcgtgaatactcccacagaaaaacaaaaaatattctgattacggttgcaggagaaaaagattatggtttgcttccatatttttcacaagtaataatgggagcatatgattattttcaaccattgggctatcaggttattctggtaaaaacaagtgctggagacatagaacctttaaaaaatataattaaaagtcataaatgtgatggtgtaatattgtcaaggacaatagaaaatgcacttgatattaaatatttacaagataatggtgtgccttttgttgtaataggcagttacaatgatagcactgtatatcaggtagatgtgaatcaacaagctggctgtcaggatttgacagagcagatattgaaaatgggaatgcgtaaaattgcgttattctgtggagatatgacacatgtagtgacgaaaagccgaatgaaggggtttttgcaggcatatgagaaaagccaaattgattttgactgtacaaaagttttcgataatactggatatgcggaaattgctgagaaacaaacgttaaagatgttaaaagaagaaatagaatgtataatatgtatggatgataatatttgcataaatgtgcttaactcgttgcgtaaatataaagttcgtatacctaaagatataaaaattgcatctttttataatagccagattttggatgaatattatccttcaatcagttgtgtgaatctagatattatgaaattggctcatacggcatcagatgtattgtatggtttattatgtggaaaaagtagagaaaaaagaattatacaagggtattcgatattattaaaagaatcaacaaaagtataaatattgaaagggtagtttatgagttttattataggagctgacatttctagcttagaggcaatggaagattatggagctaaatactatgatttaaatggtgaagagggagatgtaataaaaattcttgcaagtcatggtgttaattgtataaggttaaggttatttaataagccaactgaatcatttgataagggagattattgtgatttaaaacatacgcttagaatggcgaaacgtataaaaaaatatggactgggatttatgttggattttcattatagtgatttttgggcagactggaaacaacagaaaattccaaatgattgggaaaatcttgaagcatttgagattgaaaaaatggtttatgaatatacaaaatatgtcataaattgttttatagaacaagaaacagttccggatattgtacaaatcggaaatgaaattggaaatggtatgttatgggagtttggcaatatcaataatataaagcagttagttaaatttatcaattcgggattaaaagctattgcagagattaatcagtatagcactaatagtaagaaaattaaaacggtattgcatatagaatgtggtgctgataaagagcgtacaaaacattttttttcaaatttgaatagtgaaggactttgggattttgattatgtaggattatcttattatccatattggtcaggaacatataatcttttgatggataatattataaatataggaaatctatttcataaacaggttattgttgttgaaacagcttttccatatacggatacatcaaatgatgaaatgcaaaatgttgttactggtgaattaactaaaaaagtgatggggttaataccttcggttgaaaatcaagaaaaagttttagaaaaagtgattaaaacagtaaagatgtgtaaaaatggagctggtgttttttattgggaaccgggttggtatcaaattaagggagttggtgttgctcgtggaaaggggaatgagtgggaaaatcaagctgtttttgataataatggttatgcacttaaaagtataaaagcatttgaaatataacataatgtcgaatcaaaaaatattctgccaaagcaaggagatatgaaagaaccgcccggatgggcggttttttcagctataccatttcatgaagcatatccacaatcacttctctgcaatgagctccgagatgcttttgttcctctttgctgagtgttgccggatcaataggagtgccatagcggataaccacatgattctttttgacccatggaaggtgatcctcgaatatttcatttgttcccatgattgccattggcactatcttacatttgctctttgtggcaatcttgaaagtaccttctttgaaagactgtacatctgtcaggtcatctttgtttttgcagcgtgtgccctcaggaaatacacatatactgatgccggatttgacctgatctatggctgcaagcacgacctttagtccctgcttgatgtcatcgcggtccaaaaacaggcagtgcaggcgcttcatccatagacccagcaccggtatttttgtgatgctctgctttgagatgtagccggtcaggcgtggacatctggagtaggtgattatgatgtcaaagaaactacggtgatttcctatatatagtacagcctcgtcctttggcacattttcctcccctataaattcaatgtctgctccgcttaggaatatgatgacacggaaagcccactgtaccaggcgaagctgtgccatatcggcccatgccggggcaaatttgtgtattatccacatggctccgagcaccggaagaccgagcaacagatagaaaaatacgaatattacgattaaaactgaacgcatatttgacctctctttttcatactctatataaattgtagttcaatatttgatattatatcatatcataagcgatatgataagaaagagaggaaaaaatgtcagaaaaattgagaaaaattctggtgatggctgcaggtgtgcttgttatattggaaacgacagtgatttcgggctgccgcgcaaatatttcaggcacggagagtgacaggatggttgagtacacggtgatctgcggggatgaaatcccggaggagtttaaaaagcagataaatgaaaacaaggcaaaggcgatgaagctgacgtacaaggatgatgaatatttatacatagcggaaggctttggcacaaaggagacaggtggctacagtattacggttaaccagttttatgttaaggataaggcaatgtattttgatacgcgtctgatagccccggataagggcgagaaggtcagcaatcaggcgagttatccgtatatagtaataaagacggaattgagtgaaatgcctgttgtgtttgagtgaaaatttcgtaaattgtgttaaaagttgcgaaaaaactgacaatcagtactaatgccctattgctatcactgcgatactttgctatagtaaagttactagatattgtggtgacatatttatatattcaaatatattgattgatataattgttgattaatttgacctgttttatatttatacagagattgatttcatatatatgacaccgtcgttacaatactggttaccatgaggactatagttatgtgccagtgggcatatccacaataaggaggcttaaaatggaacagacagaaattagaaaagtcagagcatcgattcaccagcagtgtggcaacagggtaaaaatccagcaggatctcggccgcaacaaggttgacatccaggagggtgttattcagcaggcatacccaagtgtgtttacggttctgatagatgatgagtttgagcagaatccgccacagctcttatctttcacctacactgatgtgattacaaaagatataaggatgcagctttgctagtatcatgaagtaaagatgttacatcattattataatgatcatgaatttaaatatttgcatctgcataaagttactccatcttgaatatgtattttatatacatatttgaagtggggtattttttatggagttaattacacaaaaaatcagacaatgcatagaaaaggtaaaggatatgtcgcaggttggcttcgacagggattatgtcataaaggacaacaagcctgatgtttccaaagtggtttgccagaacgggcaggtaaagattgacgagataaaagcgtcaggcgagaatatctggataagtggaagcattgaatttgaagtgctgtatacgagagaggaagtttttgaaggcgatgagccggaggaaaatatcggcggaaacagagtggagcatataaaggatacaataccgtttcaggagaagcttgtgcttcaagggatctgcgagaaggatacggttcgtgtgtataccgggcttgatgagcttacggttggggttatcaattcgcgaaagctctcggtcagaggcattataagagtggagctttatggagagagggaagaaaatcttgaggttgcacaaaggattgatgacaaggatgtggagcagcttatggggcagatgaaggtgcttaagcttgacagtgttgtaagggatattgtcagaattaaaaatgtcgtcactttgccaaagaccaagccgaatatatgcaagctcatatcaagtcttgttgatatgagaaatctggagtatacatacgagcgtgaccatattacactgacaggcgagtgccatgcgtgtatagtgtatctgagtgaagaacaggaaatttgttgctttgaggtgcaggagggattttcaaatgaaatacgctgcgagggtgatgatgccggaaatattgcctggcttcgcacacagcctgccatgcatcaggttgaggcggaaaatgattacgacggagagctcaggcagctttcgattgaggcagcgcttgcggtggatggaaaggtctggagtgaggaaacagtagaggtgctcaatgacatgtacagcgtatcatgtccggtaaaacctgtgtttgaaaagatgaaggtatgcagccttcttatgaaaaatgacacaaaatgccgtattttggagcagttgtacagagaaaacagcaaaaagagaattttaagaatatgcggtacaaagacgcaggccgctattgcacagataaaaaatgcagacacaggaattattgtgtcaggtgtattgcaggtgaactgtgtgaatattgtggaggatgatggctgtccgatagagatgcatacagactctgtgccgtttgaacagtttgttgagatacccggcatggatgccaacacctgctgcgaggtaaatctgcaggtagaccaggtgcaggtcaatctactcgacaacagcgaatatgaaattaagggtgttgtcagcataaacgctattgccctgcagcaggatgaagtgtcagtcataacatcggtggagcaggaaaaaatagcgtctgatactgaagaggaagcagctctggttggctatatagtgcagaaggatgataaaatgtgggacattgcaaaaagataccgcaccactgttgaaaacataatggaaataaacgctctgacctcagatagcatcaaacctgatgatagacttataatagcgcgcatgtgaatcataaattagtggcaaaataccttttgaccttttaatcatatcattatataaaatgtggaaaattctgtaaatttacaaaaagatgtggaaaaaagattcattttgtgcgataatatatccgaatgtatattgaacataaattgtggaaggaaaggtcaatctgaccgtcgtattacaggaggaataaaatgaatcagaaatggacacgtgctatatgtactgtgttaacatcggcactcgtttttacaggaccggcagtagagggcactacatttagcggatacataaacagtggacttgagaaggtatatgccaagacacagaagcagaaggatgcagagaagaagaagtcacaggctgagcaggatctcaaggataagaagaatgagattaatggtctaaaggatcagcagcagactactgctgatgatataaagaataaatccgcaaagcttgatgagattcttgcagcacaaaagaagcttcagaaagatatcacaagcaaacaggcagagatagagcagaatcagaaggatcttgcagcagctcaggaaaagcagcaggagcagtatgacgccatgaagaagcgtatacagttcatgtatgaaaacagcgctgaggacaatatctggacagcaattattgagtcaaatggtatcacagatatgctcaatcgtatagagtacgtgtcagatgtatatgattcggatcgtgctcttatggattcttatcaggcagcagttgagcaggtgaaggagattggtactaagcttgacaaagacatgaatgagctcacagccatgcaggatgactatgagaagcagcaggcagatgtcgaggcggctatagtagctcttgaaaatcagaaggagcagtatgcaagccagatagctcaggcacagcagcaggcagataattatcagaatatcattacggcacagggcaaaatcattcaggagcaggaagcagcagctgcagccgcagccgctgccagagcgaacagctcatcaagcagtccaagctatgatggtggtggagccggtaagggcggaagtattgccagtgactatgcagcaggcggtggaaagaacccgggtgcatcaacaggagtttcaggaagctctgtagtatcatacgctatgcagtttgtgggcaatccatatgtatggggtggaaacagtcttacaaacggtgtagactgttcaggctttgtacatgaggtatatgcacattttggtatcagcacaccgagatattcacaggcatttaagtctgtggggcaggccgtatccttcgataatatacagccgggagacgtagtggtatatccgggacatgtagctatatatgcaggtggtggtgttatagtggaggcacagtccacaaaggcaggaatcacagcaaacagaagcgtacagtgtcatacaatacttgctatacgacgtcttgtataggatggttaggagccgataagtatatttattatacttaccggctctttttatttttaccacaaagtactgaattgttaccaataaagtaaggggcgtaagatgcggacatgccaccaaccgcaaggggctctcaataagcgactagcggagctgtttagagtctgtagaattatgcacatggaacccagaaatgtcctgccatggacggcagggcaaggtgttatgcgccatggatggcgcataaaagccggtttcgtcgagcatagaaaaccatataggcataattcgtacagcctcttgacagcatagcgttagcgtattgagagccccttgcggctggaggcatgtccgtgtcttacgccacgaaccaatgttagtaaccggcaacaaactcattgtaataaataatagcaatttccatccataaggtgtattatagagatagacggcaccaattcgcacaaaacgaactagcaagcctgtaaataaagtaagaaaagcaggaggaacaagccatgcagatggaacaattacaaaaagacatgattgcagcaatgaaagcaagagacaaggtaagaaaggatgctatatcctcacttgtatcggcagccaaaaaggcggcaatagatgagggctgcagagacaatataccggaggagcttgtcaacaaggtcattcttaaggaaatgaagtctgtgaaggagcagattgacacatgccctgccacaagaacagatctgcttgatgagtacaataccaggtatgcaatctttgaggagtacgctcctgcaatgatgtcggcagaagaggtagaaaaggagctcacagagcagttttcggatgtaatcgcaacaggaaacaaaggacagataatgaaggcagtcatgccgcatttcaagggcaaggctgacggaaaggtcataaatcaggtggttgcaaagctttgcgcaaaataagaaaacacatcacaacaattatacttgcagtgctggctgtcatagccggcgtgtatgcatataattatcatgatatgaagcagaatattgtatacaatgagcatctggaagacgtggctgttaacgtgaatgggaaagagctgacattgcgcgatatggcattttatgtggcatatgaggagatgaatgtcgagaagcaggctcttgtgtatgattccgataatccaaacaagtattggaatatccacacaaacggtgaatttgtccgtgttgcagcgcgcaaagcagctatgtccatggccattcacgatgagattttttatgagatggccaaaaaagagagcattacacttactgacgacgagaaagcagctttgaaaaattccgagaaggacttctggtatgatttgtctgatatagatggtgcaaagaagcttggagtcgaaaaaaaggatatttattcgtccatggaaaagtctgcaatagcccggaaatatcaggaaatatatgcagggcttgacaatgccgatataacggattatgatttctcgggaggcagatatgagaagctgctggagaaaaataactataaaataaaagaaaaagtgtggaaaagagtcgatatgggaaacgttactcttgatcactagaaagaagattttatgtcaacaaaaattggaagaaatgacccttgctggtgtggcagcggaaagaaatataagacctgtcatgcggcatttgatatgaagcttgaaaagcttgctgaggcacatcataagataccgagccattcaatcattaagacacctgaccagatagcgggaatcaaggagagcgccaagataaatgtcgcagtgctcgactacataggagaacatatccacgagggtatgaacacagcagagattgataaaatagtctatgatatgaccaccagcatgggtggcatccctgcaccgcttaactatgagggttatccttacagcgtatgtacatcggtaaatgagcaggtttgtcacggatttccttcaaaggacgtcatcttaaaggatggtgacatcataaatgtagactgttctacaattttaaacggatatttttcggattcatcaagaatgtactgtatcggaaatgtaagccctgaaaagaaaaagctcgttgaagtcacaaaggagtgtgtggagcttggactcaaagaggtaaagccgtggggcttcctcggagatatgggacaggcggtgcacgaccatgcatttgcaaacggttacacagtagtgcgtgaaatcggtggacacggagtgggacttgaatttcacgaggatccgtgggtaggctacaacaccaagcgcggcaccgacatggtcatggcaccaggcatgatatttaccatcgagccaatggtcaacatgggcaaggccgatatctacgtagatgacaagaacaactgggaagtatacactgacgacggacttccatcagcccagtgggaaatcatggtactcgtcacagaggatggccatgaggtgctgagctggtaaaccggtaagtattacgagagtgcctttataaaaggacattatttcataggcaataacattataaagggcgtgtgaaaaacgaaggtttttcacacgcccttttttaaatagtgagataagtcacttgattgcttcgcataagtaccctaaatttaccggagagcatgcagtgtgttccgaagaaaaatataaactgccacggcgttccataaaatgtggatacgacaattcatagcaaactatcaataaactatctgcaaatgatgccgtggctgattttatatttttctgaggaatatactgcatgctatgccggtcttcacagcctaaatatgcgaagccacataagcgatggcgtccctacagatttgtattcaccccatttatggtcgcattctcattctccctcataggaatgacgagacacttctccccattgatgacctgcgcatgaatttgtgaagccttctccggctttacatgaagcaccacatcataggtcttaatttgggcagtgtaattatcaatctcttcctgcttctcaagaagctgtgaggtgcgctcctcaatctgattatttttctcctggataacagagtctttctcctcaagctgcgcatttttctcattgagctcgagagttaaatcgccgacctggctctcaagagcaagcttttccacgcggatttcattagctgcaagagcctttgaatcaatgacattggctgcgataggcggcttgtcaccgaaggcctcattgacggatttttcaatgcgtgaaatcttttcctcagagacatggcagtcactaagcaccttgttcatagcctcactgtcgagaatgaacggatcatcgtcatcatcgtgagtctcagcgtagtcatcggccatctcggacagattctgctggatatcaagcagcttgtcatccgtgctctcgtcttcagcgcctagcacgtttctgacgattgaatgaaaagccatcttctgctcagtagctgtgcgctccacaccgcagccgaggccgtttgtcataaactcagagtgaggctccttggtatttttcgtatagaaaagagtggagtgtatgtcagtgcttctatcgttgaaggcagggaataaaaagcctgtctcaggtgcaccgaccacccagtcccttatgcgggctccgatacgctgctccttttccagatagccaaggcccggctttgaaagtgtgacagggcagatggcgcagagcatgtatttgtacacctcctcggactcatccacgttgatgttgtcctttgtgcgtgtcatgacatcgtagctgtcgagatacaaaagaatcagatagttcccggcctcatcgtaggtgtcgatgaccagatcatagtatgtatcgagcagagtctcatcattaagctcgctgtcgcgaagcgccatgagaatctgctggcggcctccgacctcttcctcctcaagcggaaactgcagattgagcaggttgtttccgagagtgccggaaagcaccttgtttgaaatctccagatatttgtagtattcatcctcctccagagtgagaaatttgccaccgaatttgcagaccttttcatggttgcagtccacgtagcagccgaccagacgactgaaggttgcctggtctttttttaatcttcgttttagttccaatacttcttttttgttcatattatcctcgcattattttcataccattcaaaaatttccgtaatcacattatatgtatggaataaatatttgtcaattgagcggcgccttttatgtcccgctgtcaatcaagaaaaaagatgacagaccaaccacaaaatgctataatttaggaaatcgacggattatgatataaaggctgacacagagacatccacaggtgtctctgttcttggattgaggcataaatggagcagaaaatgacaaacaatcacattacaataggcattctcgcacatgtagatgcgggaaagacaaccctgtctgaggccatgctttacagcaccgggcagattcgctcactcgggcgcgtggaccatcaggacgcatatttggataacgatgcgcaggagcgagagcgtggaataaccattttttcaaagcaggcaaggcttgatatttcgcgtggcacaaatgcggcagatacagcagatgtagcacgtacagcagatgtagcacgtacggcagatacagctcgtacatggcatgtagtcatgcttgatacaccggggcatgtggatttttcggcagagatggagcgcacccttcaggtgctcgactatgcaatacttgtaatcagcgcaactgatggagtgcaggggcacacgcgcacactgtggagacttttaaagcactataacgtgccgacatttatttttgtaaacaagatggatatgcagggcacggatgcggagaaagtgcaggcagagctaaggagcgagctgagtgatggctgcgtggatttttcttcacaggatttatttgaggagcttgccatgtgcagcgagcctcttttagatgaatttatggaatcgggagagcttacagatgcgcatattgcgcaggcggtggttcaaagggaggtgttcccctgcttttacggctcggcacttaagctcgacagagtggaaacgctgattcaggggctttcgcggtttatgtgtgaaagaaattatcctgacgatttttctgcccgcgtatacaagataggcagggatgacagaggcagcaggctgacatttttaaaggttaccggaggatgtcttagggtcagggacaaaatagagtacaaagcgcatggcggtgacgaggcgaaaggccttctgattgagaaaatcgatcagataagaaagtattccggcgaaaaatatgagatagctgatgtggcagaggcgggggagatagttgctgtcacaggtcttagctcgacatttccggggcaggggctcgggtttgagcagcagtccaatatgccaatccttgaaccggtactaaactataggatgattctaccggatgatgtaaatccggcggcatttatggaaaagctaaagcagcttgaggaggaagacccacagctttacatagtgtgggtggaggagtttaaggaaatccatgtgcagctcatgggacaggtgcagatggaggtgcttgtgcgtctcataaaggacaggtttggtgttgttgtcacgtttggaccgggcagcattgtatataaggaaacgatagcaagggctgtcgagggagtaggacattttgagccgttgcgccactatgcagaggtgcatctgcttttgtcgccggcggagcgtggcagcggaatcacagttacatccacctgcagtgaggatgtgcttgacaaaaactggcagcgcctcatagccacacacgttgaggaaaaggagcacaggggtgtgctcacaggctcagcgcttaccgatgtgaaggtcactattcttacaggaagagcacatgtaaagcacacggagggaggcgatttccgccaggctacatacagagcaatccgccaggggcttaaatccacagagagcgtgctgctggagccatactacagctttatcctacaggtgccgatggagtatgtcggccgtgcaatgacagatctggagcagagatttgcaagagccgagagcccacagtttgccacaatcgctgcgagggagatggcaacaattacaggaaaggcaccggttgcgacaatgcaggattatgtgagtctggtgcatgcgtatacaaaggggctcgggcatctgacactggagctgtggggttatgatgagtgtcacaatcctgcggaggtgattgcgcagatgcactatgacagcgaggaggatttccgcaatccgacaggctcggtattttgtgcgcacggctcaggctacgtggtgccgtgggatgaggtcccggagcatatgcacctgccgtatgtctaccacggagatgagtctgaggaggcacttgcagcgagtgcccgcacgcagaatgcattttcagcggaggatgcgcaagtgcttgccggaaaccgccgcaggacgagctttgagaaagctgtttcaggtatgtcatcagtggagcttgatgcgcagcttgcagatgtttatgccagggagtttggcatgggcaaaaacgatatcgcagaggatcagaggcgcaaatggtcaggtaaaaagaaaaatgagtatgaaggtctaagtggtaaaccgcgcaccgtaaagcatgataagcacggcaatccgatttatccgaagaaatccccgggggaagagtacctgatagttgacggatataatataatatttgcatgggaggatttaaaggagctctcgcgcataaacattgattcggcgagagatgcgctgaaggatgttttatcggattaccagggctataagggctgtcatctgctgctggtgtttgatgcgtacaaggtgaagggcaatgccggaaagagagagaccttccacaacatagaggttgtgtatacaaagcaggacgagacagccgatgcatttatcgaaaagacggtgtttggaatacgtgacaggtacaaggtaacagtggcaacctcggacgggctggagcagcagacggtcatgagcctgggggcactgcgaatgtcagcccgcgagcttaaggagcatattgagatgacgaagcgtgccgggatggaggcattcatatcaggataaacggtcatgaatggtaacaatatgtgtataaagagatgtttataaagaaatttgtatgtcataagcagagatattataatggtaaacatgcaagaacatcagagataaggagacaagaaaatggtagtaaacgaaagcatgtaccagctcggaagcgtgcgctcagcaatcagggagctttttgagtatggtaaaaaaagagcagcaattgtaggtaaggaaaatgtatatgatttctcaataggaaacccgagcataccggctccgcagatagtaaacgacacaataaaggagcttgtgacagattatgattctgttgcgctgcacggctacacctcagcacagggagacgtggaaacgagagcggcaatagctgaatttttgaacaacacacatggcacacattttaatgcagacaacctttacatgacaatgggagcagcggcatcgctgtcaatctgctttcgtgcgttgacaagtgacgcatatgatgagtttattaccatagcgccatatttcccggagtacaaggtatttgtgaatgcagcaggagcaaggcttgtagaggtgcctgcagacacagagcattttcagatagatttcgatgcgcttgaggagagaatcaatgcgcacaccagaggtgtcataattaattcaccaaacaacccatccggcacagtctattctgaggagaccatcaaaaagctctcagacctccttgagaaaaagtctaaggagataggaagaccgatattcattatcgcagatgagccgtacagggagatagtttacgacggaatcaaggtaccgtttgtgaccaaatattacgacaacacactggtatgctactcatacagcaagtcactttcactgccgggagagagaataggatacgtcctcgtgcctgatgaggtgtacgataaggcagagctgtatgcagcagtctgtggtgcgggaagagcactcggttacgtgtgtgcaccaagcctgttccagaagatgatagtaaaatgccagggggcaaccggtgatatcaatgcctacaaagaaaacagagaccttctgtacgagggactcacaaggataggctatcactgcttcaagccggacggagccttttatatgtttgtaaaggcactcgaggatgacagcaatgcattctgcgagaaggcaaaggaggaggatgtgctcatagtagcagcagacggcttcggctgtccgggctgggtgagaatatcatactgtgtggacagggaaatgataaagcactctatgcctgcgtttgaaaagatatacaacaagtatagtaaataatagttacaaaaaaataatccaaaaaagcgccgaaaattgtctaaaaaatatgtaattttcggcgcttttattatgcagttttcacaaagttgtctccgtgtgaccgttgtgtgaccattgttttgtataatggaatgaagagtgggaatataaataaaatcgtaacggaatagttacaaaaaatactatagaaaaggagatatgagagtgtttaataaaaaacttaacaggttactagcaatcatgctagcttctgtaatgggtgcgacatcgcttccggcaacacaggtaagtgctgatacaccctcttcagagtatgatatatctaacgacgcagcttcggatgatatatctgacagtaaaattccagatgaacaggattcggataataatgccaccgaggaaaaacagccacagcagctgacggtagagtatacaccggcggatgatatttatgtggggaacaaagttgttccggtggtaaaatccgacagggcggatgcagccgttgacaatttaaaatacactgttgtagaaggcaaaaatctgattgaaaaggatacagactttgcatcaaacggtatatggacagcaaaggataccggaactgtaaggataaaggtgacaaaagcagaagatgacaaatataagtcagcagaggcagaatatactgttaccatcaaagaatatgattacagcagtatgaataacagcctgacagggacaatgctgcagggtacaaaattttatgtagaagcacctatattatcgctggcaagtgacaatcaggcggtatatgtggttagaaaaggtgatgaatggattgaagctgataaatatcagcttatgccacagcagggtgataacagacagactcttgtaatagcacgtaaggacaaggaaagcggagctatcacagatattggaagtctgcagctcgactacaaatatgatacacagcctccaaagataacattgaatccaaaggaggatgataaacctgctttcacaaaggatgctgtggattattatggaaatgtcagaaaagtagacatgaatatccacgatgtctctttggatgatggttccacacagctttgggtaaaggttgatgaccgggaagaattcgatgtatttgatgtcgataatgcccagaagctgattgatgcaggaatagagtatagtgactggatcgtgacaggggctgattatagcagctgcatcacatttggtacaaaagcggatgaggaacacaaatatcagataatcggaatgtatgcgaaggatcaggcggagcatgagtgtaatgatacaagctcaatagagcagccgttttatgtggatagaaaagcgccttcaggtactattggatatgatgctgatttaatagacgagcagaatatggccagtcagcaggcaacaaatgtatatggacagctggaggatatcagcggaataaagcaggcattctactatgtgaataaatcagatgaaagtggcagtattttaaatgatgagcaggtaaaagcgcttgatgattcagcatggaagccgttagagcttattgaggatacatatgatgcccgatataagtacaagattaatacatctgatctgaaggatacttcatataacgtatatgtaaaggctcaggacaattgtaatggcgagacagcatttttctccacatcgaagctggttgttgataccctgccaccggagcttacagtgtcccaggataccatgacagcagccgatgaaaaaggctggcataaggatgatataagctatatcgttaaggcggatgacagcttatcaggaattaagagtgttgaatacactgtatttgatgggaaaaggaaaattgtatcaggacagactgttgagcttgacgagagcggggaaggaaggataaccattccggcagcagagcagtttaacggaattgatctgatgctttcagtaaaggcaactgattatgccggtcttaagacggaggttaaaggtgacagcttcaagttcagcatggacagtcagtcacctgatgtcagtatagagccggaagcgggcaaaaacagaaaatatttcaatgacgatgtccgtataaaaacaagtgtagctgacagcatttcaggtgttgtatcagcaaaataccagatagtgacagatgatcagtcagtatcggatgatgaaggtgcatggaatgagcttgatgaatcaggaatcataaatgtatcggctgaggcttatctggataaaaaggtagatgtatatgttaaagctgttgatgaggcaggaaacgtgactgtagcggatttgacagcaagcggcagccagccattttatattcacaaggcagcgcctgtaataacagtgacatatggtacacctgagcagccggatccacagtgcatcagcagtgtaaaaggcactgagtattacagggaaaacaggattgcaaccatttcggtaaaagagaatgagcttttctttgacccagatgaaacaaaaatcaatgtaaaggttgatggaaatgaacagacacagtcagatgcgtggtctgaaaagtcatactgggtaaagacaggcgagggagcagaagctgtttacagtaagcagcttgtattcaatgcaggacacaagtatgagctgagtgtcagtgcaaaagatttgtgtggtaattcagataatggatttgagatagaaggagacaaatcagcagagtttgtaattgacgtacagtcgccgacaggaaatatcaggtttgacggactttcaacaggcatggataccgtgtgggatttattgctgccaaaagacaaatatgagatttcaagatttgctgccaagaaggtcaatattgccggacagcttggagatgagcatggcggcatcaagtcagcagagtatttcgtttcagcagaggatgcaataattgacgtagacagtattcaggaggctgactggaagacacttgacagccttaatgaggatggcaccttcagtgaaccgatagaatgcgagaacaaaaactgcgtggtatatgtcagggctacagatttaagcggtaatgtttcatatatcagcacaaatggattggtagttgatacatgcgcaccggcaatatcagtcatcacacctgagacagcatcaggagtgtacagtgcagatgtgccggtaagtatagaggtatcagatgagaatgccacaggagttgcatcaggaataaagagcgtaaactatacggtaacaaatatgggacagccgacacagggtggaacattatatagctatgataagacagcagcgggcttaaaagatctggaaaatcatgtaacagagcaatttgacataagcgcggctttaaacaacagtaatgaagtgcgtatagatgttaccgcaacagacaatgcaggaacggcatacacagtaacaaaatacataaaaatagatacaacggcaccaacagtgcaggtaagctatgacaataacagtgcagatacatcatttggagacacagcatacttcaaagcaccgcgaacagcaaccgtaaaagtaacagagcgtaactttgatgcatcaaaggtagcagcggaaataaaagccgcagcaggtaaggcacctgctctttcaaactggagcacagaaggtggaagcggtaacggtgatgatacagtacatgttgctacaatatattacggacatgatgacgattacacatttggaatcggagtaaaagacattgcgggaaatgccgcagcaggagtggattatgcaaattcgcttgcaccgacaaaatttacaattgatacgacagcacctgttatttcggtagtatatgataacaacagtgcatcaaacggaaactattataataacaagagaacagcaactgtgacaatcacagagcacaattttgatacaagcagaatagcactgagcatgactgcgcaggatgcaggaaaatcagtagcagcaccggcatttggaagctggtcagataatggtgatatacatacggcaacattaagctttgatgcggatgccacatatacatggtcacttgcatatacagacaaagccggcaataaggcaaaagaccttgcaaagcaggagttctgcatagatacgacaaagcctgttgtaacaatcaaaggtgtaaccccgggctcagtaaacaataattcaggaaatatgtcatttgtaatagagtgcacagatactaatcttgaatacttttcaccggtgcttacagttgtggtatatgaaaatagcagattcgtaagaaaaacgattaccggaaatgtgatatcaatttcaaacggacaacgtgtagagtttagaaatctcaatgaggatggagtgtattcactgacatgccatgcacaggataaggctggaaattcttatgaaacagtcaatattatagatgcaggcggaaagcaggtgacagagactgcagggcagggagaaaaattgatggatttctccataaacaaaggcggttcaatcttctcgctggatgacaatacgatgaagcttgtaaaggattactatgtgcagaaggtataccatgatgtggtagtcagagagataaatccggatgaagttaccagctgtactgtcaaagtaaatggaaaagcacttaagcagggaacagacttcagtgtgaataatgtaagtgaaagcgatggctggcataagtacgaatatgtgatatcaaatgcggtatttgaaaaagagggtcagtacaatatcgttgtggagacaaaggacaaagcagattcagttgcctacagtgatgtgaagagtgtaaatattgaatttattgtggacaagacagcacctacatatacattgacaggtgtagataaaaacaatgaaaactatattggctcaaagaatgcagtattgatgccgaaggatgatggcggaaagcttggacgtgtaaagattactgtagtgggctcggatgacaaagaaaaaaaggttatcaaggaaatgtcgggagacgatatgcttgactatctggacaagcatgacggaaagatagagtttgaagtacctaaggaggtgctctctgcaaaagacggtgattcaaggcttatggtagagtgtgcagactgttctgttgacgaaggtggaaagaccaataaagtgaaaaaaatatatggtaaggatacagaagcagatacagagattgccgaagatgatgtacctatggaatcaaattcgtcagatgtcaaatcagtagaaacaaacaatgataaggcagtatatataattggagcaatattattatttgtacttataattgcgatattgataatcgtttattatatgagaaaaaagatgaaagaaaagaaagacaatgatgagcaataagataattacctatgtatttacattaccatgtggtggtgtgggaaaaacaacaatgtctgtggcatgcgcgaaagcgcatgcccttcaaggcagacttggcaacgaagattttgaattctgggaggagggtgtatgagatttgaaatagcagctgacacggacagaggaatcgtaaaagaaactaatcaggatagtctgctggtaaagtgcttctcaacatgcaaaggagacatggcatttgcagtattatgtgacggcatgggcggcttatcgaagggtgagctggccagtgccactgtagtcagagcatttgacagatggagtgacgagcagctgcctgagctttgcaaatcgtcgaacccggatattgacagtctgattctggaaagacagtgggatgaagtaatacagcagcagaacgaaaaaataaaagcatatggcaaagcacatgcagtaaacattggaacaacagtggtagcgctgcttgtcacgcaaaaagcctactacattataaacgtgggcgattccagaatatatagcctttcagaccatatagaaaggcttacgacagaccagacatatgtacagcgggaaattatgaatggaaatatgacacaggagcaggctatgagagatccgcgaaggaatgtactgctgcagtgtgtcggggcatcagcagaagtaaagccggagtacaggaccggggcaatgaaaaatggaatgtcacttctgctttgttcagatggcttcaggcatgaggtatcagaacaggaaatctatgagatgctgaaaacggcagcaactgtagatgggcagaatatgcacgacagactggagcagctcatcagactaagcatgcaaagaggagagcgcgataatataacagcagcgctcataaaggcacagtaggaggaacagatgcttgaaataggctctttaattgacggaaaatacaagatactaaacgaagttggacacggcggaatgagcgttgtgtacctggctatgaatgaaagggcaaacaaacagtgggcaataaaagaggtcagaaaggatggagtaaaggattttgaggtggtaaagcaaagtcttgttgcggagaccaatatgctcaaaaaactgagccatcccagtcttcctgatattgtcgatgtcatagatgaggatgacagattccttatcgtaatggattatatagagggaaattctctcaagacagcattgcaggagtacggagcccagtcgcagaaaaatgtgataaagtgggccaaacagctatgcgatgttcttggatatctgcactcacagaacccgccaatcatatatcgtgatatgaagccggcaaacataatgctaaagcctgatggaaatgtggtgcttatagattttggaacagcaagggaatataaggaaaataacatagaggatacaacatgtcttggcacgatgggatatgctgcaccggaacagtttggtggaatggggcagacagacgcgagaacagatatatattgtctgggagccacaatgtatcatcttgttacgggaatgaatccctgtgagccaccttacgaaataaggccgatcagagaaattgacccaacattgtcaggtggtcttgaacgtattattacaaagtgtacacagccggatccaaacaacagatatcagagcgcagctgagctgatgtatgaccttgagcactatacagagattgatgacatgtataggaagaatctaaagagaaagcttgcggtatttatcaccacatcagttttgacgatgctgcttggaacaagcacagtattaagctattgtgcggcagaacacaaaaaaaatgaaaactataatagcatattaaaagaagcggatacctatgacaattatgacaatggatattacacggctatagtcaccgacccgacaaggacggaggcatatcttaagctgaatgacaaactgacagacgattttgtgctggacagggatgaggcgcagatattgaacaggctgatggtaggtatagattgcaaggaccacaatggccgggtgcatacatatgatgttatggcaaagctgaaagaaaaaaatccaaagggatatgaggatgtatgctataagattggtgaaagctttttattctactacgaaatcaatgtggaaaaagacagatactccagtgcggcgcagtggttcaaggaagtaaaggagaatcatccggaggcaggaatatactgtgagatatcagattgtctgacattgattagccagtatgatggagcaaagatacaacagacagaaaaaacatatgaagaatacaaaaagctatggaagcaaataaatgagctatatgcaaaatcagagaattttgacagcttagacgcaaagattcaggtatggaatgagatagatgatatagttgacacaaatatcacatcatttatagcagtgacagataaggataaagttatggatttattacagacaataaaggacaaaacagaaaagctggataaatccataatgcgcgagcagataacaggattgcaggataatatagacaaaacaattgagaaggcacagagcgtgaaggaggaaaacaaagatgacttataatcagtacaggatgatattttacgtatccttcaccgcatttgccataatgcttatagcttcaatagtcatacttatagtgcttgaaatacctaaggtcataggtgcacttaccggaaaatctgcccggaaaggaattgcagcaattgtacaaaagcagacagcgggacatattgacataacatcgtccggtccgatagcaccgtcatataacctggcaggggagaataagaaaaagccgggatatacacaaaatatagatgaaactactgtgctggatgcaccgacagaagtattgcaggatgaaaccacagtattggaagatataaccgaaaagctgcaaaaaaccaatatcaggttcgaagtaacaaagaaaatagaatttttacatacgacagaatgtatctcataaggaatggaaaatagcgaatgtctaaattaaaagtaagcataaaaaaatcgaccgttactgccatgatgaaggcaggacgaaaggaaagaataaatgaaaccgaactaagccagctagccagaataaaaccatgtggaatcatgcatgtgacaaaaacaaaaaaagacagtgtcatatatacgtgccctgcaaatataaatcttaccgatagattgaaaaaagccataagcaaatatgatttctttttcatgattgagcagatagtaataatggttgaggatgtatacaataacggactgaacgtaaacagtgttcgttttaatatggatgacgtatacataaacgagatgacaaaagagatgtactttatatattttccgatagtaggaggacaggaaagtgcagatattgtcgggtttatagaaaacataatttatacaatgacacctgttatcaatgaggatacgaattatatatccagatttatgtattatgtcagaagcttccatggcttcaacggcaatgcaatagaaaaatatatctcacgcgaagagcgtgcagttgtgaacgtgctgaaaaacaaagcagtgacaatgcagcagacaatgcagcaacagataatgcagcaacagataatgcagcaacagacaatgcagcaacagataatgcagcaggtaatgcagggcagcatggatggaactacagtgttgtcagatgatggcatatccgtacagcagatacagcagatgcaaccggtgaactatcattttgcaagtcttacaaggcaggtaacaggtgaaaagatagagcttggcaaaccatcgtttgtgctgggaaagaatccggaaaagtcagattatgcggtagcagacaatacgaatatcagcagggtgcatgcagtgataaccacgcgaaacgggcgttattatgtaatggaccaaaattctaccaatggcacatttatcaatggaaggataataaaggcggggcaggaaacagagatattaccgggagactgtctgatgttagctaatgaggaatttatatttaatgaatagcttcaaatataaaaggtgaggagaataatactattatggaactaaaagaattaagccgcagaatatcaaggtaccgggcaaatgtagaaaatctgcagcttgagaaaaacaggctgtttaatgaaatagatgctctggatcaggatgcattgaaaataaaggaatataaatggcaggcgcaaaaccggtttaaatgcagagttgataatatagccggcatggacagatatagcagtcgtaatataacaaatctgaagggcaggcttaagagtattaattcattaaacgacggaaaatcgtatgtagccaatgcgatgaatgctatagattcaatgctgagagatgtagagaatgcaatcaggagcagaaatgacaggatatatgaaataaaccagcagctgtgtacatatgaggacaatatagagcagctgagaataaaaaaaagaagaatggagagtaagtaatgggacagtacaatttaatgtttgagcaggaggaatttacagaacttgtgcgtttatactcagaacttgcaaagattgcagatagacagatgaacgaatatcagatgatacttgatattataaacacaaatgcagttataagcggtgaattgcacgataagctggaagtgtacgaggatgctgttcatacatatcagagtatactgggagaatccttcagggaaatgtcgaaaaaacttaatgaatttgtgagagatgtagatgaggcagatggagatatatatggtataggaacatatgaagcgtattagaaggaggggtgacgcataatgaaatttaaggattttacgcaggaagcgtacgatgacatacaaagctatatgggaggagaagaacagtgggaggaaataaacaaaacgtacggtgtagtggaaaccaaaggtatatttcaatatgattatgaatcacagctaagaaacgcggcaacagaatatcagagacaaaatgaagaggcaagcaatagtgtaagaaggatgtttgataatgtaaatggagtggatgatctatatgcagccaggtttcgggacgaatatatggatttggaaagattcagcactgcaattaaagaactggcagctctgattaatgtaagatccgttgagaatatatatacgatggattgccagacattgaaaacaaaagctggtaatatacaggcaaaagtggactcgaagataacagagtattataaagagcgattctattcagtggattctaatggaaagacagttatgaactgggacgaaataaactatgagatgcggaaggaatttgtaccagatgcagagctgcaggcacttgtatcagtatttccaaagctgtccacagatgatgaggaagaaaccatagcaaatatagagaacatgctgcgcgcaggttatggaaacgccaaggatgatgagtggatagataatgcagatctggaagaccctaagtattacagtgtgagtgtcacgaatacatttaagagggcggtggatatatataagacaagtatggatataattgactattacagcgaaaaatgtgcatacagaaacgacgagattagtgatgaagcgcttgaagagatgaaagagcagtacagagtgtcatccctgtttaaagcaatggttgatagctacccgacaataggagttgcatataatggaaaaaacgatggatttacaatacattccgatagagagaaaaatgtgaccgtatccgtatgcctgaaagagctgccgtttgatgtaagcatatgcaagattacagacagcaatgacagggagatattggacaaatattataacgtcaaggtaacaaatggaactattaatgaaaaagtaggaaaagaaaatgagaaggtcaatcagatagatgcgtatggaatggtagataatcagattgtaagccatgtacttccacacggcatgattgagaatacaaagcagaatcttgaaaatcaaaaggaagaggaaaagactgaatgcagagtattttttgatgtaacaagtaatactttaaaaggtaagattattgatgaagctataggcctttcagcggtaataataaatgaaaccgtaggaaataagattaacaaggctaacgcagcaataaattatttgaatgacttaaatgcagcatatgatgaaaataatgaaaatgtacaaaataatgcagaaattgatgaagcaaaagacagactgacagaaacagactttacatgtcaggacatgatagaagatgccaattattttggcatggatatggagataaccaggataggtgacacctatatctgtgagaatatcacgacggatgtggagaaagtgacgaagatggtggatgcatataatgcacaggcagagccggatatgaaggtaagtattgatgacttggagggctatgccaggggagcaggcgataaaaatcagagagaggatgacgaaagttataatgatttgtgcaacagagtatcaaaatatatgaagtacgttttggaaaattgagataacaataaataggaatgaatgcaacgcatacaggaaggaaaatttattatgaagaaagcaatatcagttcttatggtagcagcatgtatgttatgtatggtgacagcatgtgaaaaaaagaataaaaaggaaaatgatacatcagcagttcaggcaacagaaacagattgcacggcagcagagcttgtaaccacagagccggaaggtgaaatcacgatatcagagatgatagatcaaaggattaaagaggaaggaaagataatgatatatacgatgttaattggtctttcagagactcctttggaaataacagaggattcaaacgtaaatattatatcgtatgatgggaaagaacttatcggttatagaaatagctctaatcgcagaggggagaccagacttggtgacataatacataataaagtggattattcaacatataatataggcgcatatggtggaaactggaagcgacatcgttatgtgtctggtggagacgaaaagtatgtggaagaagaaggctatgtacagcgcgaaatcactacagatgattcggaaaataatacccagatggagacactgtattcgtattcaaagggaactctttatacaagagaggagggaagtgaggtatggaatcagacagagaaaaacaataaccttccggtagtatcatttggaacatttgagaggataaagctggatggaaaaacatacatgacattctgcgtaagagataatttgaatctgatagagtatgatattattccggacaataaatttacagagaacaagacagttgtatatgacactccgggaacagagaaaaccacagtcaatacagtggattacctcaaagaataccaggcggttcccaaagaagaactggagcagatgatagttttcccgggcagtaaaaaagcggaaagctcacaggctgcagattaaatacggtatgattgcttatgcaattatatataaaaattattttaaggaggacatgaaaatggcatcaggacagatcagaatgacacctgacacaatgagagaaagggcaggagagtacaggacagaagcagataatgtacagagcgtaatcgacaagatggacagattacttgaaaccctgctcacagagtgggagggctcagcatcagaggcatatgccaacaagtttgcagagctcagaccttcatttgtaaaaggaaaagagctgattgatgatatcgcaatggcacttgacaagactgcagaggcagtagagtcaaccgatacacagatagcaaatcagttcagcatgtaaaattcattcaatgccggattccacaccacaggctgtggtgtggaattgtattgtatttgtattgtggtcatattgtatttatattgtggctttatttcaagagcagcagagctgcttttaaaataagaccataattttatacattaacaggaggacagaaaagtcatgataaaaagcggagacagtaaagaaataagacttaaggaatttagctatgcgctggagagaatggagagtttaaaatcaggaaatgagctgactaataagatagttgaaatacagggaacccagatacacagcaaaggagacagcgtgccggaaatagagagcataaatacttttctgacaacaatttcatttgccgtggaggatttatttaataatacatatgaggtattgaataattcgttagagcagtatatagcctctgatgaagcgattggaaaattatgggaacaaatacagaacgataatgacgaaaaggacagttcggacccattcaaggatgtagttattaattttcagtcaggacatgattatagattaaatgagatattaggtgacgttaaattgaaaaaataatccggagaaattacatcatgatgagattgtttaggactatgtgtaacagagtaaaggaatatatgaagtacattttggaaaattgagataacaataaataggcatgaatgcaacgcatacaggaaggaaaatttattatgaagaaagcaatatcagttcttatggtagcggcatgtatgttatgtatggtgacagcatgtgaaaaaaaggataagaaggaaaatgacacatcagcagttcaggcaacagaaacagattgcacggcagcagagcttgtgaccacagagccggaaggtgaaatcacgatatcagagatgatagatcagaggattaaagaggaaggaaagataatgatatataggatgcattttggtccgtcaaagactcctttggaaataacagaggatttaaacgtaaatattatatcgtatgatgggaaagaacttatcgattatggaaatagctctaatcgcagaggggagaccagacttggtgacataatacataataaagtggattattcaacatataatataggcgcatatggtggaaactggaagcgacatcgttatgtgtctggtggagacgaaaagtatgtggaagaagaaggctatgtacagcgcgaaatcactacagatgattcgggaaataatgcacagctggagacactgtattcgtattcaaagggaactctttatacaagagaggaggaaagtgaggtatggaaccagacagagaaggataacagccttgatatagtatcatttggaacatttgagaggataaagctggatggaaaaacatacatgacattctgcgtaagagataatctgaatctgataaagtattatataattccggacaataaattcacagagaacaagacagttgtatatgacactccgggaacagagggaaccacagtcaatacagtggattaccttaaaaaataccaggcggttcccaagaagaactggagcagatgatagttttcccgggcagtaaaaaagcggaaagctcacaggctgcagattaaatacggtatgattgcttatgccaacaagtttgcagagctcagacctttatttgtaaaagtttatcagaacaagaggagaagcaatatggcaagtctgttagaacgattaaaatatataatagaagatatttttggaaagaaaacctatgcagaatctcagagagataaatataaaaaagtagtaaggaatttggaaaaagagttaaagaaaacagacaatttaagtgatgttatggatcaattggcaacagatttcaatacaatggagatgaatccggattctgctcagggaaaactcagcgacacttttgtaacaaaggaaagtgaaaatcgcgaggcagtagaaaaactgggggctgattttaaagaaataattgcagaagtaaaatcaaaattggaatttgcaagagatgaatataattactggtgtgacgaagcaaaacgtgaagatgaggaaatgaagatatatcagcagcaatattatgaagaggaagagagaataagaagagaagctgcggaggaagaggcaaggcgaaaaagagaagcgtcataggttgattagttagttatgggaaaggagaatgtatgcaggattttaaaatgtcaggaagcaatatgaatgaactgctgactaacatgaaagcaataaaggaaagaatagatgattcctacgatgaattgaccctgcttatgtcgcgtattgagagtgataaattgtggaagggaaaagaggaaactacttttatggcatatatggggctgatgcaacaatatcataaaagtttttcaaaggctaacgatgacaatccggtgcagcaggcaatcgaagcattaaaatctcatggtgacagagtagatgatttttatgatgaatttcaggagtataaggatatggaggacatgtaatgagatttacggagcatgaaatggtgttttttaatagtattacaaaaggaaatgatgtatttggaattccattaaaatttcggacacagaaaagtcacgaagaggaagttaaaaaaactataaatggattgatagaaaagggtgtgcttgcatctgaaacagaattgacgaaaatgggattttttccggcaagagcgttggaatgttataaagaaagtcggaatcatattattataaattatttacatattgcacttttggaacaaagagaggcaattgtgatcattcccttgaaaaatagagaatatgagatgttacggctgccgagagtcgctgtcttatatttattattgaaaatatatccggtattacagactggaacagtatcagaaaaggagcttttacagctgcaagacattgattcttttttaagagaagtaaaagactgcaaagagaatatcatgataggagaatttcaggataatgcattaacaaaagaatggctttattattggaagaataatcggatatttgagtatgacctgaatcggcagataaaaagagaagtgggtgcagtacaggtaagaagagaattactgagacttctggcaattgatgaggaggtaaaaaattatgcgtagtagcgtagatacggcctgcagcggatcctcagaagaaataaaaataggtgccggtgttttggattatataagtgaattgggaaatatccaggcaaagattttggaggcatatacctatagtgaacagtgtgtacaaaatatagaatcagaggatacatatcagggggaggccagagaggagatgcttgcattttttaaatccctagccagtaatatgcagaaaatgacatttttgtatcaggcggcaggaacgtacattcaaaatgcttataatactatgtattataatgaacagcaggttgtggaatgggtcattggacaaattggaggaaatgaataaaggttatggaagaagaaataaaaaaagcatacatggattggagtgaaaaaggtgtaagctatttaaattgtatgtatgtgtatgatataatgatggatgtggacgaggcactgcagacctgtgataccattttagatgaaattgacctgggaattgactatacatctagggaaaaggaaattgacaggcttttagaggggcatggaacccttcaccgttatattgatgtcttaaattgttacgtggatgataagctggatcagcctttaaagaaagatttcaagaaaaatgctacagaaacaatcagccgaatccatctggaagactttgaggtagataatacgctgggactgacagaaaataattacataaccggtggaatgggatatgccggaaccatggtagaacaggaaaaagcaaagctgacttttgcagattttattggaacttctgacggaaaggcggatggaaatgggcttcatatatcgtataccaatggaagtgtagaagattttgcaagtatttttgcagcacagtatgaggcaatgaaagcatctggagctttaggagaagacaataatcttacccaacaggaatttttggagcagttttataggcagggagaatttacccatgatagcagtaacccatttttaaactttgtttcgtccgtattggatatcacaattgtcaaacctatcatagaggcatgtaccggagaagatttgataaccggagaagacctgacagacatggaacgtggacttaaggtggtttttgcagtggtggatttggttacacttggaggagccattgcagcaacaaagttctcggaaatggggttaaaagaaggacttaaggcatttggaaaaacagccctgatagattttgcgggaaatacagcagcctgcggtgtgggagcactgggagaagcctttgactggccggtaccggtaacaatgatgctgagtcttgcagcaggaatcacggtaagtatttcgggaaataaattgctgtttaaaaatgcagatgggatagagattggggcaaagacgctgagtgatgctgaggttaaaaaaatcggggatgtgttggatgaaacaacaaattctagctttgcaaataaaaatttgggagaagtgttaaaacaacagggattaacattagaagaatttaataagttaagattgacggatgtaaaggatttaacaaaggagcaaatcgcacagatgaaggcaatacgcgaggcagttccaaagatagatgctaacacttatattcaaaagacaataccggcttcggatatagacaagtatataggagaagatggctggtctacaattggcggttatgtggcaagatatgatgatgtatcacacataaaaggatatgataatgttgtggagtcgtcgcgacttgattatgtaacaggtgatggagtaagaccgtatccggaaggtggagatacttatgcatatattaaattcaagacaacagatgcagaaaaaataaagacaccatatggggaaatattcggtggaacaaatacagatggtcctccttgtacattaaatggatttacaggtgcaaggaatgggcaaattatacccgagtggtctttaagtggtgaatatgtaaaacctaagaaaggtgcggaattacataaagttgttaatggaaaagatactgttgttgcaatatttgatggtaaacattttgtagaagtgaaaggaaaatagaaaatgataaaaaatggtgaattttgtgtatataatggaaatgagtacgaattaaatgaggataatgatggaaacttaataataattacaacaaatcgcgaaataatagatgcaacgtttgttgatgaatataatagcggagtatatagtaaaataatttcgccaaatgaaattcaagaagcatatgagtgtagaacttatggtttgattaatggttataaggttagtattaggaaagagttgaaagatactttttttgtaggcacaggtgatagaaaaattgctgatatacttggattgaatagaacagataagtacttgtatgagaaagaaattgccaaggataaaatagaagtagttcaagaaaaaaagaaaatagaagtatgattgaatcaaaataatgcatactgcacgggaaaacttgaaaaatggtgaatagaaggtaataaaatgaaaacattaggaaaaatagcaatataagtatgtagaattaaaagatgtagattgtattgttcagaagtggacaccatataaggaaaatatatgataaaacattactaacctaaaaattgacataaaaatgcaaatacgataaaattttgcgtataaaagggcacacttatggaaacgtaaggtcgcaaagctagagtctaacacagagtaatatttatgtaatgacagatcggctgcaacatccggtaatatcggacgctgcagcctttttgtatataaaattttacctaaaggaggaacatgaaaatggcatcgggacagatcagaatgacacctgacacaatgagagaaagggcaggagagtacaggacagaagcagagaatgtacagagtgtaatcgacaagatggacagattacttgaaaccctgctcacagagtgggagggctcagcatcagaggcatatgtcaacaagtttgcagagctcagaccttcatttgtaaaaggaaaagagctgatcgatgatatcgcaatggcacttgacaagactgcagaggcagtagagtcaacagatacacagatagcaaatcagttcagcatgtaaaattcattcaatgccggattccacaccacaggctgtggtgtggaattgtattgtatttgtattgtagttatattgtggctttatttcaagagcagcggagctgcttttaaaataagaccataattttatacattaacaggagggtgtgaatgaatatgaaaaagtataggagaaaagaataaatgtttaatcgtgattatttagaaaaattaaagcagtatgtaggtaaagatattcagttggtagagagtgacaatgaagtccatatctatttggattctgaaattcaatattttttaagaaaaaaggaacaaaagtatatattgtatgttagtgaaagaggaaaggaaacggaagaaaaaagatatacatcagaagtggatatgaaaagaaattttgcattatgggtaaagagtaattttagtgaaaatattaaatatccattttcaggaaaatttagagaagttaccagtgtagaagaactaagaatattgatgcagcaatatgcagacgaaaagacgtattccataaatgatccaaaagaagagagaattaatatattgaaaagtgaagatggtcagtatagtattttctttttggataaaaacggtaagaaatacatattagaacaagagacagaaaatccatttgtgttcaaaagattttataacgaagtaacttattatggtgaaacgatgagacaaattagagagtatgaggaagtttttgaagataagttagaagatgatgtgaaaatacagctgttaggctactaaaatgaaagagggaaaatgagtatcgatttagaaaaagcatattttaaaaagttggaaaaatatgttggaaaaaaaataaatattgtttcaaatgaaaatgaaataagagttatatatgatgttgagacatcttatgtcttgcaagaagaaaaagaaatattttatttttattgcatacaaaggaatgagcgcataaaaatagctgaatattattcagaaaaagaaatggaaacaaattttgcaattgcaataaaaggtttttttagtgaaggaatagattacagtggttcagaggaaatagaaggtgtggtaaaactttcggatgttaatgaaataatgaagttacatatcggtgaaagttattactcaattatgaatccacaaaaattaaaaattaatctagaagaaaaagggtcaaataaatataatatttatttgcttggaccaaatggtgaatgtgagtatatcgaagaaaatgaagaagctccgtttgtgtttgaaaggttttataatgaagcggtgtatttaaaagtgatattagaacgagttagagggtatgaagcaatatttgaagaaacattaagtgaaaaagagatatatgatattattaagtaaagtgtgtcgtaattgatgagaacaagtgacataggaggttcagaaaaaacttaaaaaatacagaaataggaaatagtggaggaaagtataatgacagtagaagaagtgaaaaagattattgatgaagagagtttaaaaggaggaaatctgtttgaaaaaagggaaaataaagagaatgaaatggtaattatgaatgttgcagagcaatggttggtatatgcaactgatgagagagcaagtaaaataacaggttcagaaaaaaagtttaaaacagaggaagaggcattagataattttattacaagattaagggcattaaatgtattaaaaaactgaggtaatttacggaagtaatacgtttaatggttcagttatctacggaagaaaaattacgctttatacacgcaatgtgcttttaacattaccaacttaaaaattgacataaaaatgcaaatacgataaaattttgcgtataaaagggcacacttatggaaacgtaaggtcgcaaagctagagtctaacacggagtaacatttatgtaatgacagatcggctgcaacatccggtaatatcggacgctgcagcctttttgtatataaaattttactaaaagcctgctaataaaaagtcaatagtaaaatgaattatttttatgattgtgattttgggcacaagttttgaaccgccatatttgccggtttgaagaaaaatgagtttagacttggttattgctctaaattacggatgcattccttgaccttgccgtaatagatacgcaggaacttattagccccagcagtcatgtaaacatagtaaggctttccttctgcacgcttcttgacaagaaattgatataccttatcatcttcaggagctgtttgaagcagtgtagacatgatttgaaacaaagtctttcttagacggttggaaccgcatttagatgctttattactctttgaattgtgggtgcctgactgatccacacctgggtctactccggcaaaagcagtcaatgcttcacgatgtgagaaattggaaatatcacctatttctgctataagctggggaccaaaagtttttcccacgccatacatgcccattaccgttgtgtattcgggcagagtagaagcaagttcattcatctttgaacgtagttcttctacatgggaagaagcaagattaagctgctgaatgctttgctgaataagcagtttataagacgcttcttttggaaagacagcaataaggtctttggatgcaagaaatagttccgctggttttgctggttggaaattatagtgatgctttttacagaatgcttgatagcgttccgtgaatgtttttaatccaattttgcggacacaatccacatgccagaatgagtaagcataatccacccatttttcactgccatcatcgcggacagggctgtcaaagagtttattgacaccaggataggtattatccaatagtgcaatcaggttagccttagcggcaaccttttgcttcatgaagaagctgaattgtgagtttaaagtttttaatttagtacgtgtattatccatacttgaatactgtcgcagttctatccagttgtcaagagtatagcgtgcaatcttcttcgcatcagcagggtcggatttgactttgcggatggagttgttgccaaagttcttgatcagatgtggattgacagcactgacaaacaaaccggcttcagaaagagtttttaccactggttcatggtaacgcccggtgcattccaaaacaacacgggtttcaccttccagactgccaatgtatttggcaagctcatccagttcacttgatgtgtgattaacattaaaaggcttacgaataataacacctgctggttgcaggacggcgacggtgctcttgccttttgatacatcaatacctactgcgttgtacattctcgtacctccgaaagtgaatttgtatggtgtccagctatttctcattgcttattcaatctcctggggtatcaaacggacgtgcacagggcagtccaacctgcataaatcgaacggctgcaaatgataggctggctgactggctttcatacggacgtctattgagtccaaggagaatactgtcagaccgatacctcatcattgtacagctttagcaataagagggatagaacccaactggctgttggggtatctaaaccctacacttatatattaggaggagattatagtagattggcttcatataaaggaaaagcagcagttgaaggatgggggaaaggaggaacaatacagtatgaactttcgtcaacggtagaattagaaagattaggattattaagagaaataaactagtatggaggtcagaagatgaaaatagaggatgcaagaaaaataatacaagaggaaagtcttcaaggttacaatttatgcgaagaacgagaaaatagagaaaatgaagtagtgcttaagaaagaaaatgaaaaatgttgttacacgcaatgtgcttttaacattacaaacctaaaaattgacgtaataatgtaaagaggagcatcgtaatggaagatagtgaaaaggttattgtaaattttgtgaatgaaaataatggaaagagacatgaattggaaatccccttgaatataacagccaaagctctggtgactgcattaaacaaagcatataatctgcaaattgatgaagccaatgagaatgaatgttatatggcctgtgagcagccaattgcatttttgaaaggaaacaggatgcttgaggattttggtgttaggaatggttcgacaattatatttgggagaaaatgaaaatggaaaattatggatggtcaatagaattaaatccgggatatgttctgataatagggaatgcacctgatgcacatatacagcttgacagtgcatatggtagagctgtgagagtaggattgcaggtgaaagatgatatatcatgtgctatgttatcggaatatagttcgtcatacaacacattagtaaatggaaaaagtattcaaaggattgcaacagtaaaaaatcatgatttcatatcaataggagattttactgcatattacaataatggaaaaattttctttgattatggagctatcagaacaaatggagttgaggtcagaccggagagcttggatatacatacaacatatcctgtctttattcgtaatacgcgaatacaggcaaaaagagataaaactccaatagaaatattagatccgggtactattccgacaaaaccggaactcaatctggttacttcattgatgccttcgattattatgtttgctctggtagtgctgcttagaggagtgatgagcaagtcaaatggagcttttgttgcatttagtatatgttccatgggtgttggagtctttacatccatatttggtattataaataaacaaaagaagtataagaaagaccttgtaaaacgaagagacacatatcttgaatacatagcaaaaaaacgtaatgagatagaagctgcaagaagagaggagttagattgtctaaacgctcagtattatagcatagagcaggatattgaacatatagagaattttgatccggtattatttgatcgtatatctacagatgaagatttccttgaagtgtatctggggaggggaaacgttgagtcattgcggcaggtagactataaaaaacaagagaaacttgaggttggagatgatcttagcagtctgcctgagcatgtggcaggagaatatatggatattgaaaaggcgccggttgtgatgagtctgaaggatgctaatgcggtgggggttgtcggagatgcggattcgttgtattcgatgatgaagaatatgattatggatattatcagcagacagtattatggtgatatctgtatatatgcattacttgatgataatatcggaaagtataattggcttaggggaataaaagctttgaatagctcgaatggcaatagaaatatagtttgcgatcaggaaagcaaaaacagagtatttgaaaatttgtataaagagctttctatacgaaaagatgaaaaagtacatggcagatttaatataataattgtaatgcaggactatggcataaagagtcatcctatttcaaaatttatagagcatgcatcagagctcgatactgtctttatattttttgaatcaaagccgtctttgctgccattatattgtagcagaataattgatatattcgacaatgagagtgccatgatatatgattcggtcaataagacgcaaaagaaatattttgagtatgagaatatacctgattggcgtgtacagaaggcggtcagcattttggaaccggtggagtgtgaagaaataatcctggcaggctctttgcgtaagaacatatctttgtttgagctgcttggaatcaactcggtgcaggcattgaatttgaaggagagatggaattcatcaaaaatatatgaaacaatggcagttccgttgggagtaaatgtgaaggatgagattgtttatctaaatctgcatgagaaatttcacggtccgcatggacttgtggccggaacaacaggctcaggaaaaagtgagattttgcagacgtttatacttggggcagcaacgttatttcatccgtatgaaataggttttgtgataattgattttaagggtggaggaatggttaatcagtttagaaagctgcctcatttgattggtgccataacaaacattgatggaaaggcaatagacagatcactcaggtcaataaaggctgaactgctgaaaagacagaatctgtttgcacagctcaatgttaatcatatagataaatacataaaggcatataaagagggacaagcaaaagtggcattaccacaccttgtcattattgtagatgagtttgctgagttaaaggcagagcagccggaatttatgaaggagctgattagtgcagccagaataggacgaagcctgggagttcacctgatactggcaacacaaaaaccggcaggacaggttaatgaccagatttggagtaattcaaagtttaaattgtgtcttaaagtacagacgcaggaggatagtaatgaagtcttgaaatctcctttagcagcagaaataaaagaaccgggccgggcttatttgcaggtcggaaataatgagatatttgaattgttccagtcgggatattccggcagccccgagagcataaatggtgaagatgatacaccgtttgatatatatgaacttgatttttcgggaaaaaagaatttggtatataagcataagctcgagaattcagagcagtcaaggtcacaattggaggcggttgtcgaatatgtagataaatactgtaaagccgatggagtaaaaaaactgccggatatatgtctgcctgcgctggaagaagtgatagtatatgatgctgaactggcacataatgatacccctctttctatgactgctgtaataggaatatacgacgatccggacaggcagagacaggggcggacagtaatagagataggtaacaaaaatactattatcataggagcatcgcagtttggcaagaccaatcttctcgaattgatagtgaggaatctggcagaaaactattcaccggaagagcttagcatatatattattgattttgcatcaatggtacttaaaaattttgagaagctggctcatgtaggaggtgtagtatgcccatctgacgatgaaaggttgaagaatctgtttaaatacctgagtgaacagatagaagaaaggcgtgaaagactgcttgaagcgggagtaagctcatacacatcatatcgcgaggcgggatttacagatatacctcagatagtggtactcatagacaattatactgcattaaaagaactgtatctgcaggatagtgacatactgctcaatctgtgcagagaaggtggctctgtaggaataagtttcattatttcaaatttacagacaacaggactgggatataagtatctggcaaacttttccggcagaatagctatgttttgtaatgaatcaagtgagtatatgactctttatggaagctgtaaactcagaccggatgagactgctggcaggtgcctgacagaaattgatggggaaatatacgagtgccagacatttttagcgtttgagggaactaaggaaattgaacgtgttaataatatgcatgcatttgtagatcagataaatgctgtatatggggatatcactgctgacaagataccggaaattcctgaattgctcacaccggactatgtggatcacacattcagaagaaaaaatgatgagaatattataggaattgcatacgacacagtcgccccggtttacacagatcataataaatgcaatatcataactatctccggagctgataatatgggcagaacaaattttataaaatattttgcgttgcagatgttaaacagcgaaatagatactcatatatatatagctgatgatttcaggcgcaagctgtctgatatcggtcaggaaaatgtaagctatgatctggatccggatgaatttatacagaaaataataatgatagaggttctcttagaggaaaaatataagagactcatccatcaggaaaatccggaaaaagaaatcaccctgatcataataaacagtcaggaggtatatacagcgatatcagatagcaaggatgctcttaatgctcttaaaaatattatgggcaaatataaggtattaaatgtgtatctcctgtttggggcagtaccaaatgcgcagatagcatatggttcgcctgatatatataaaatgatgaaggagactaaaagcatactgttttttgataacctggataattgcaagatagtggatataccgctggctataaagagaaagaatcaaaagaaaatcgaaccgggtgatgcatattatatattcgaggatgaggtcagtaaggtaaggataccactggtctcagattaaaactgatatgattgcataagcaattatatataaaatattatttaaaggagaaaatagaagatatttttggaaagaaaacctatgcagaatctcagagagataaatataaaaaagtagtaaggaatttggaaaaagaattaaagaaaacagacaatttaagtgatgttatggctcaattggcaacagattacaatatcatggagatgaatccggattctgctcatggaaaactcagcgacacttttgtaacaaaggaaagtgaaaatcgcgaggcagtagaaaaactggggctgattttaaagaaataattgcagaagtaaaattaaaattggagtttgcaagaaaagcagaaatatttatggcagatggagtttctttgactcagatactagaaattttaatgcagttggcacagtatatttaatgagaatgaagggagtaaattatagtgaaaaaatatgtcagcacaattatttttatatctattatagtaatatcagtattaatgggagttagacagtataaaaatgatgagagcttaaaatctaaagaaaatgaacctcaaacagaggtatcatgggctactccatggggaatggcaaccatgaagaaagtagctgatttgaatgaaacagaaagctatgatacgactaaaagcttttataaggattatgatgatactggattggaaacttgcatattaactggaatatttgcagatagtgaggaagaggcaataaagcaggtaagagaaacaggacattgtagatatgcttatttgacggaagatggaaaatgtgagattaagcttacagaaaaacagaaatgttggtggatagattcggcaaagaaatcaatacaaagagtattggatgaggcaaaccagttagatggttgcatatttgaggttaatgataattttacagatttaaatgttcagataagtaaagaaaaggtatcaccagattatttttatactcaagttatacaggttatttactgcgaggaaataatacagctattttcaggagaagatgagtggtctgtacattttgttgtgaaaaatataaatacaggttatgaattagtaaatgtaaattatcctcaggaagagtgggaaatatcgggtgagacttgggatgaataaggagaaatgatatgaaacaatacgttataggaggattgtaaaatgacaaaaatcaagaaaaaacataaggcattaaaaattataataatagtttcagcaatactgatagtactattaggtgtaatgagatatttatttggaaataaagaagtaatgtttggagcaaatgtaaattcaatgtcttacagtaaggacatttctccgcaaaactatagttcagtagatgaggctatgaaaactgtagatgaaaaacttaattcagaggagaagatatgtcagattgaagataatggtgttgttcatgtgtatgtgcaagggataaatactataaaagataaaaatggaaaggttgatcaaatacgacagtatgtatcatgttatgattttatagtagtatctaaaggctataattatagtggagtacgtgatttggcaattggattaaataaggaaaaggaatacagctggaaggatacattcttagcagatctgtcacaaagtagattaagtggtttggaaaaacagtatggtgttcttccagcatggggcgtcacagattattctgacattagcaatgtgacggttgatgaccagaaaattgatgaagtgcatgaaattgatgtcgatggtgagacatattatctttggataatttatgatttgcaaacgcagaataaggtttctgatgttataatagagtaaaagaaactaggagtagaaatggaagtgaaaaaagtggaatgtacaggaaagtgctattttgtattattattagcattgtttcagtttatggaatgtggaatattgttaattgtgatgttaaagtgtaaagttcaagttttttttgcgtatgtattattagatttaatattagttatgctttgttcaatagcaatatatttcttattatactggaaaaataagaagatagttatgtcagataatgagattatctattatccaataattggtaaagttagaacatattcatggaatgatgtcaaagaaatatattacaaatctggcttgagaggtcatagtagacttgtgattgagacggataaaaaattatatatggattgtgaaatgatgaaaaattgtggagagatagtaaaactcataatgaaaaaaggatatttaaaaacaaatatctgatgaagatattctgattacattcttgtacagagagaggcaaggatgtaatcatagactatgcctatgaccacaggggaaatctgttatccgtaacaagcggggaaggagtcttaagagcatacgggtttgatgcagcaaactagatgagcagttccatgggaatgacagacgaaaccatccaaaaggcagtctatcagtacaacggattaggtcacagaatgggacaaaacattgcaacagggggtgcagccccggcccggaccagacctatttctgggatggcaatgttgccggaatggaagaggtaaaaaatgtgataatagtagtaggcataataggattaatagcattaatattatttataaagatgaaatatggtacatatggatattatgattttcagcatttttttgaccaaagtaaagagaatattattgaaacctatggttagcctatagaagatgaatatataaatgaatattgtgaagacatgacatatgaggatattaaattcgtaatatcattgccgggagaaaagcctgaaagtgctagaattacaagtcctaacatacggttttgaattttgaaaattggagtaggatcaccaaaatgggaagttatgctggcatatggattgaagaaaccattaaaaaatgataagaagaatcagtatagtgtacaaaatggtatatatgcaacaacattttattttgatgaaaatgatcaggtgtataaaatgacatgtggagtaggcatatacactttctagaaatgcgagcaagtgtataactttaaataaagccatgaacattaatattattgttggtaactatataaatgtaacacataaactgtgcaaaagcataaattaatgtgcttaaagtagataaaaagcatttcagctatgatgcgtcagacagaatcagcacagtaactacaagatttaaatggaatgtgggttacgataggcagcagtaactacgtttgttatggagagtgttggtggttatgctggtataattagcaatggtaacgaaatactaacagataaatatggggtatatatgcgaataggatatgtatatgttgtggtaatagcagctgtggcactggggtcaatgttatatggaaatgatccaagtagtgcagggcagacaattattaattttattaataattttgtaaataatggtgtgtgtccagcgcttcagtaatatgaatgatataaaggaagaaagataacatgattaagaaaaaaaagaaaataataatcgcaataatcgtatttgtaatagtgtttatttgtatatgtataataatgagatatttgcatagggatgatgaatttttaaagggagcaaatggaaatgctatgacatatattaatgatgtacatccaaataaatataagtctgtagatgaggcattattagatgtagatgaaaaagtgaagtcagaaaaacagttatgtcagacagaatataatggggtagttcatgtttatatgcagggaaaatttcaaaacaaagaagaaaatgaaggaaatacatcatatgtaaattgttttgatttcatgaaagataatgagggatatacttattgtggaggacgtgttttaaatattgattttgtggagagtcttgcagaagacagctatacatgggaagagacttttgtttcggatctttcacaaagcatgcttcacacatttaaagccagtgtagagaagaaatataaagcaattccggcatggggcgtcacagattattctgacattagtaacgtaacggttgatgaccagaaaattgatgaggtacatgaacttgatgtggacggcaagacttattatctctggataataaatgatttgaagacacgaaacaaggcatccgaagtctggatagagtctgttgacaagactacccaaaaccgataaaattacacctatcaaggcacacttatggaaacataaggtcgcaaagccagagtctaaaacagttacacgatgtaatgacagatcggctgcatcattcacggaaagtggatgctgcagccgtttttattttgaaatatgcaactgtaagcagacatcatagttatgaaatgattattgataaacaggagaaaattaaacagaaatgataagagacttctcagaaaaagcaaagcagaagcttgaaggctatgcggatgatgccgcagcttcatccacatggggaaagataaaggactggttttcggacaggggaatggatttccggagctgggcaggaaagctcggcgcaggtgatacatcatgcaagaaaagcagtgatcctgtaaacttaagcaccggaaacttcatctatgaccatgaagacatgcaggcaggcggagagataccgctttcattccacagatactacaactcaaaggataccggcaccggcacaatgggcagctgtttcctgcacaattatgaaatggaagtgcaaaagcagccggaccaaaaagcggcggtgcgcatgcgtgacggacagttttactactttgcggaaacagacacaggctatgtggcggaaaacgcggcgatggggcttttggaaaggacagaagacggctataagcttacatgccatccgggcatggatgccgtgtactttgatgaaaacggaaaggcggcaagacaggaaaacacaaacaaaaggggaatcacatttatccatgatgaaagaggaaggctggcaaaggcggaaaccgatacaggaagcttccttgagtatgcatatgacagtgaaggcatgctcatggaagtcacagaccatgtgggcagaaaggtaaagcttgagtatgacggaggcatgttaaagacagtcacgacaccgtcaggagcagtgtacacatacagctacggagacaacggaaggataacggagacagtaaatgcaagaaatgtcacggccgtaaggaacagatacgacagcctgttcagggtgacacaccaggagttcccggacggcggcacgatggactttgagtatgatgacaaaaacagccgcgtcacactcacggaaagaaacggaagccggataacatacgtgcatgacagccggtacagaaatacagccacgctgtatgaggacggaacaagggaaaaatacctgtacaatgacaggaaccagtgcatctgcaggacagacaggaacggccacaccgtgcgcatgtcatatgacagcaggggaaacctgacacagacagtggatgcgggaaagcgccgaataaacttcacgtatgacattttcaacaaccttaccagcctgagcatcaacggaaagacaaggctaaaaaaccactatgattcaaagggaaacctgacaggcacgacggatgcactcggaaaccggacgaagataaaaaatgatgtcttcggaagggcagaaaaaatcacatatgcagacggaagcagcactgagctttcatatgaccgcagaggcaacatcacggcagtaacggatggaaacggcaacagcacgtcatatgaatatgaccttttaaacagggtgataaaaacaacggacgcaaacaacaatgggatacatttcagctatgatgcgtcagacagaatcagcacagtaacagacgcacttggaaatgtcaggaaatacacttacaatgccggggggaaggtgacaggccttacggatttcgacggaaagacagtatcctttgactacaatgacctgggaaaaatcagcgcatacacggacaaggaaggataccgtgcagagattgcatacgacaggatgtggaacgtaagcagcataaagtcaccggacggtggaatacagcggttcatatacgacagcgacaacaggcttaaagagcatacgctgcctatgggtggaaaaatcaggtatgcatatgatgaggcaggaaacctgctgtccgaaacggatgcagccggaaacactgccaggtatgcatatgatgaggcagacagactggtgcgcatggaagcggcagacggggcagtaaccactttcggttatgatcatgagggaaatcttgtatcggaaaccgatgcgctgggtcatgtgacagaatatacctatgatgatctgggaagaagaacgggtgtcacggatgcagccggagagaccacaagcgtatgctacaatgagattggaaatgtggacaggatatgccatcccaatggaagcagcacagtatacacctatgaaaagggaggcagactcagaagtgtgctttatccggacggatcaggtgaaaaatacagttatgacgcaaagggaaatatgacagaacgtataaccatgtctggagaacgttatcattacagttatgatgttcttgacaggatagtatcaataacgaatgctgtcggtggaacacagcactttgaatatgatgcactaggacatgtgacagaggctgctgatgaaaatggaaacataacacgttatgaatacacaccaaatggaaatctgtcaaaagtaacggatgctttaggaaatgagactttctatcagtatgatgccatgggacacctgacacagacaagctgtactggaacaggcggagagcagacacagaacactgcatatacatgggataaggaaggacatgttgtggcagtgacagacccgctgggagatatggaaacatatacatatgatcctgccggacgcatgacctcaaagacggacagggatggatatgaaactgccataagctatggagcagatggacaggtagaagagatcagatacgcagacggaaggacagtgtcactcacgtataatgccatccgccagttagaggaagtaaaagactggctcggcacaaccaagatcgccatggatgaggcaggacgggtatcttctgtcacagacccatacggaaaaacggtcgggtatgaatggggaagaatgggcgagagaacagcccttatataccctgatggaaaaagggcagagtatgagtataataatgcaatgcagcttacggcaatgaaactcatgtcaaacgaggcaccggagcagacaatattgtacagttatgatgaagcaggaagactcacaggaaagcagatgccgggaggaagcagcacatcatacgcatatggaaaccttggaagggtgtcagaaatcctgcatacaggagctgattttgaagaacattatcattatggatatgatctaataggaaataaaatatcagcagaaaagaaccggcaggggataaatgcagatagcggaagatatgaatacagctatgatgtgatgaacagattaacaggtgtatcgtacgatggaatgccacaaagacagtacagttatgatgcatttggaaacagaagcagaaaaacagaatacacaccaaatggtaagcttataaccacatatggctataacacaaaaaaccagctgataacagaaaactctgaaaatggtattagaaactattcatatgaccataggggaaatctgttatccgtaacaagtggggaagatgttttaaaagcatacggatttgatgcagcaaacaatatgacagaatcaatggggctgactgccggtatggtaaagagagcaacttacgagtataatggacttggtcacagaatgggacaaaacctgattgccggtaattcagatccacaaaagaatatccactatacactggatctgacacgccaatatcataatctgttacagaaatcaactgacaaaggaatacaaggaaatccgctgcacagtactcagacttatttctgggatggaaacgtcaccggaatggaagaggaaggaaaagatcatttttattttcaggatgatctgggaagtccaatgcgtatagccgatgaaatgggaaggagtgaggaaacatatggtttcgatgaatccggaaatagcattgagtgtagtataaatgcagtcacaaatcctatgcagacttttggttttacaggatatcagatggatgaagcaggaggtctgtactttgcacaggcaagacgctatgatgccggagcaggaagatttgtcagtgaggatttcctgaaaggacacatcgcagttccatacacgatgaatcattacagctactgctggaacagaccgatggacctggtggatttgaatggaaaattcccatcatggagagatttgaagaaattctggaataagtatatttatggggaagaatatgttatatctgtatcaacagtggaggttactggtcgtgatatcggattagggacatattggggtagaactgatgatattacgaagcctagtgcgcaatatacaggtagttggataaaaaaagtcacaacaactgatggcgatgatggaatatctcaatcatatagcttaaatataccaagcatagatttgggaaagaaaaataaatttgggattccaacatcgttaggagttgcatgcagtaaagatggagtaagtttagatgcaaatataggcattgatataggtaaattaaatgtaaatattccgataagtgttggtttaaattgggataatttagtttctatagatgcatcattaaatggtggatgggcagataattcatatggacttgatttgagtgcaggactacatccagggtctaatttaaaagtgggcgtacatagtacaaagagtaatggtatcaaaacgtcgacagataaatgtggggtatatatgcgaatgggatatgtatatgttgtggtaatagcagctgcggcactggtgtcaatgttatatggaaatgatccaagtagtgcagggcagacaattattaattttattaataattttgtaaataatggtgtgtgtccggcgcttcagtaatatgaatgatataaatgtaatatataaaggaagaaagataacatgattaagaaaaaaaagaaaataataatcgcaataatcgtatttgtaataatgtttattggtatatgtataataatgagttatttgcatagggaggatgaatttttaagtggagcaaatggaaatgcaatgtcatatattaatgatgtacatccaaataaatataagtctgtagatgaggcattattagatgtagatgaaaaagtgaagtcagaaaaacagttatgtcagatagaatataatggggtagttcatgtttatatgcagggatattataatgttaaatttgaagatgttgatattaatagaacaaatacatacataaaatgctatgattttgtaacagtttcagatggttataattatagtggagaacgaaaattggtgattaattttgatgatgataaaaagtatacatggaaagaaacatttttagctgatctttttatgagcagagatgctgtttataggggagctgttgaaaagaaatataaagttcttccagcatggggcgtcacagattattctgacattagtaacgtaacggttgatgaccagaaaattgatgaggtacatgaacttgatgtggacggcaagacttattatctctggataataaatgatttgaagacacaaaacgaggcatcagaagttcggatagagtctgttgacaagactacccaaaaccgataaaattacacctatcaaggcacacttatggaaacataaggtcgcaaagccagagtctaaaacagttacacgatgtaatgacagatcggctgcatcattcacggaaagtggatgctgcagccgttgttttttttgaagaaagtcgctgtaagcaggcagccgtagtgaggcaaatatagagaacatacaaagcagaatcttgaaaatcaaaaggaagaggaaaagacagaatgcagggtattttttgatgtaacaagtgatactttaaaaggtatgattattgatgaagctataggcctttcagcagtaataataaatgaaaccgtaggagataagattaacaaggctaacgcagtaataaattatttgaatgacttaagcgctccatgcctgcgtttgaaaagatatacaaaaaatataataaataatagttgattataacgaataaaaaatacgcaaatgccgaaaattgtctaaaattgtacagttttcggcattttcaatgtatactttttacaaaatccgtggaaaagtgctccgtgtgaccgttgtgtgaccaaagtagtgtataatcttactcaagaggaaaacgtataaataaaatatgaggataagaacgtgtgctttgggataaggagccggaatatgatagattgtcgcagagcatacatagggacgaaaatggaattaaagccagaagcatttaaagggaaaatgtttaaggtaaatgaacggaaaatttttttgaaaaaaattaaaaaaatacttgcattattcgtttgaccatgatattataatacacggttcgttggtcaagcggttaagacgccgccctctcacggcggaaacacgggttcgattcccgtacggactgctaagtatttaaagccggtacattcatggaagcatgatgtaccggctttttcgttgtatatatttatatgaggcagagctatttatgagcagctacagctgctgtatgctttttgaagccgtcaggcgcttttgtgatgcgaagggcaacgacaattattgcggcagcaaacagaagctgtattcccatgcatattgaaataaagccaagctccctgaccggatgaaagtcaatactttttacagcctggttgtaccagtaggcaggcaaaaagtgagcggcctttatgatgccatcgcttagaaattcctccggcacaaatataccgcacaggaatgccataccgagtgacacggtgttcgcaaacatgttcagtatctcactgtttgaggtgattttgctgattaaaaaggcaaatgccagtgaaacaagcatgtagcagagcatgttgagtgtgaacaggaaacctgaaaacgagaatgtgctgcctttaaacatgattgtagctgagacaaaaattacagcgcataccacaagtccggttaaaatcacacccaaaagcagctcgcggttgtagtttgcaaatttataggatgagcaggatattctctccttgatttcctttttggagaaaacctgaaggacaggagctatacctgcaatcatcatgacaaggagcacccatcccagataactgaagcagtagtatatccctgagtgcgaggcgacacttttgccactgagcagtgagacagaagccttctggcttagcgaggtgtttactgcggctagagcatcagcttcagagtagccggaagcaatgtaagtattgtacgttttcgtaaagctgtttatggcagactcaaaggtggtcgctgcctgcgtacccggtatggtcacaacatcaagcttgaagccttcttttatgatgagaacacagtttacgtttctggcaaacaactcatcctgcatagtttcctttttgtcatttttaatatttttttgtgtgcatgtctttttaagataggctgtcagagctttgctttctgatgatttgtcatagtcaaacaccgcaaatttgggcttggtggcttcataatcatcttcagctttgtttgtgcgtgtcgcagtgagaacgaccatgacacctatgaatatggacaggtacataatcatctggcccatatgtctgttgagtattttgaaatatgatttaaatacttgcatatttttccctccgaagcagtacaaaggcaatgattaaaagaatcactgattctactgccatgattgatatgtttctgaaaaatctgtcgtagctgtcatatacgttgagcgagtaaaagcagtcggatatgagacaggctgggttgaggcggttggcaataggaagcttgtgctcgaccatatcctttataccgttggcacataaatccgcaagcacggaaagcaccatgccgattccgacagagataccgattttgctgccctctgtgagcttaggaatggcaccgattataactccgattgaaagtccgatcatgcagccgaaaaacagtgtcaggatgattgccggatatttatttccaaaatccacgccaagaagagtcatgtaggcaagtgctatgagctcaacagcaaaatggatgcttaagagtgagatatactctgaaaagataagggtgtttttgcatgccggcacaaggctttttcgcatgccgagagggcttgtatcagctaacagcctgcaggtggagcttacggctgaaaatgaggcgaacaggcagctcatcgcaaaaacagcgtaaaagtaattggtgtattcatcctgatttcccgatgaaagtgaaatctctttatactctgatgcggtttcagaaagcccggcaattgcagtctcaagcgcagccggattagtctttgctatgtttgtaaatacgtccttttgctgtttgtactgtgtcaggatggattcaagtattgtggcattgtatgagttttcatccactacaagtgaagcatcctttgtgtaaataatgccggtcacttttttgtcatttagagcttttttggctgctgagctatccatcagcttcatgtttatgaggtctgaaaatgaatttgaactgtcgaccttgtcgtcggatttactggctgaatcagtatggtttacatcgagagactcaagcacgctcatcagagtatcatcattttcagattcaaccactgctacatttattgtcttaaacatttcatccttttcaaacagatttccgaatgccatatacataaaggtggcgagcaacagtggaaatgcaagtgtccagaacaacgtgactttcaggcggaacatgcttagcatggtgtattttgagttgtgaaaaaataattttagtccattcattaatcccttagctcctttccggtaatctctaagaatacgtcgttaagagtcggaagctgcgtgtacacctgaccgaaggacagattattctgctctagataatcaagcacatggattatattgtggcgtccaccactgaaataaatccgaagctgtccgttttcaaagctgacctgatatgcattgtgcagctgctttaatgagtcaagctgtacttctgacaagtctgcaatttctacgtttattgtctctgtatttttgatcatgcgctttagctcatcctttgtgccgagcgcgagagccttgcccttatccatgatgagtattcggtcgcagagctgttcaacctcttccatgtagtgtgaggtgtagatgattgtcgcaccatcacggtttagtttttttatgccctccagaatcttgtttctgctttgagggtcgacagccacggtcggttcatcgaagaagatgagctttggcttgtgtgctatgccacacgcgatgttgagacgtctcaaaagtccgcctgagagcttctttggcagaaatttgctgtaatccgctatgtccacgaaatccattgcttcctttacatatttttcgcggagctttttgtcactcacgtaaagaccgcagaaatagtcgatattttcatatacagtcagctcgtcgtacacggccacattctgcatgaccacgccgatttcgcgtttgatatcgtaactgtttgagtacatttcctgcccgaatacctttatatctcccttatcgtatgtgagcagggagagtatgcagtttatagttgtggtctttccggagccgtttggcccgagcaatccgaaaatctcgccggttttaacggtcagattgaaatggtcgagtgccacaagctccttgtagcgttttacaaggttggttacttctatcgcatttttggttgtatccattgaattgcctccataatgttgtattttcgtttgcaagcctgatatttggctcaataacagattactatatggcgtgccggaaagtaagtgtcaaatgtcacattcgtatttatgtttggatgaggcattgctgtgtaaaaaatgacatttgtcatagtgacgtttgatggaatttgttgtaagcttattttaaggaaatggaggcttttgatgtataagatatgtagtcagtttttaatagttctatcatgcgtgatgcttatggtggtatcccttcaggtagattacgtcatgatagcgtgcatacttataggaataatcgtgtgcacatttatagacatgcaggatttgccgcagatgagtccggctaacaagagcaaaacggcagaccgggctttggatttgattcttgcggtttatattctgtccggattattttttgcaccatcattttttatgctgccgtatgcagcgatggtattcagaaagaaaaaatacacagtgtcaaggatggctgcagccgtagtggggatagctgtttttgtggactgtattttaaagctaaaacatatagcacccggttttggccgctatttatggcttacaaagctgcaggatataattttgaatgatatcttagaggttgtacttctcatggcttttgcggtaatgctttcttatttcacagagctgtttttggggtatcagatgaagctgcacagcatgagagatgcgtccatggagcacgacatgcttatggagcagatgaatcaccagcttatcgagaagcagaatgcgcagatatacaatgccacgctaaaggagagaaaccgtatcgcaagggagatacacgacaacgtggggcacatgattacgcgctctattttgcaggtgggagcaatcggtgtgataaataccgatgaaaagcttaaagcgcctatcgcagacctaaagagtacactcgatacggcaatggacagcatgagaaaaagcgttcatgatttgtacgatgaatcggtcgatttgcgtcaggcgcttgcgaagcttaagcctacagacagtgcatttgcgttttcactcgaatacgactgtgaggatgatgtgtccagagatgtcaagtatgcttttattgcaattgcaaaggaagcggtaaacaacgctgttaagcacagtaacggcgatgaaatcaggataatagtcagagagcatcccgccttttaccagcttgagataatggacaacggcacatcggttgacgaaagaagcctttcgggagaaacaggagatggaataggcataaaaaatataaaggagcgtgttgcagcgataggaggaaccatgcgtataaaggcagacgatggttttatgatatttgtgacgctcatgaagaagaaaggaacaggacatgaaaatagtaataatagatgatgataatctcgtatcactttcgctgaatacaatactgagcgcacaggatgacatagaggtgtctgcggttggagacagcgggcagcaggcggtaaagctgtacgaggagcatatgcccgatgtgatgctcatggatataaggatgcagggcatgacaggtcttgaagcagcagaaaaaatactcgggaaatatcccgatgccaaaatacttcttctgaccacattttcggatgatgaatacattgtaaaagcaatctcgctgggggcgaagggctatatactaaaacaggcctttgagagtattgccccggcacttagagctgtaaacaacggacagacagtgtttggaacacagataatggacaggataccacacctgttcggagctgatggtaaagcttcatcaggcatcggtcaggcccggttcattgacgcaatgaagagctatgatataagcggcaaggagctttcaatcatagagctggttgcagaaggactaaacaacaaggaaatagcggatgagctgtatctgagtgagggaaccgtacgaaactatatcagtgtcatacttgaaaagctgcagctgagggacaggacacagcttgcatgtttttattataaaagtatggtataacatgaaactttttctatggtttgggacacatatatagtgaagggagggatgcagattgattaatcaggcacaggatgacttttttaatgagctatatgtctcaaccaatcagaaggttttagcgtatatcattgtaaaatgtggaaaaactgaagatgtagcagatatatttcaggaaacctatacagaggttgttaaaataatacaaaaacatggaatatcatattttaagcagccggatgcacttgtaatgcaaatagcaaagagaaaaatttttcgtcattataaattaaaagaaaagctgcgtggcattgagaaaatgaactattataatattttgtcggcagatgaaaatgatatagctgtacaacagacttcgtttgatgatatagcaatatcaaaagaaacagtacaaagtgtgtttacatatctttctgcgaaggatgaacttactaaaaaaatattttatttatattattatatggataaaaatatttcagaaatagcactccttttttctgtaaaggaatcaaccataaaaaacagattatatcgtaccctaagggagcttaggcaaaatctggataaggaggattgatgcagaatgaaaaaaaatgatattttcagacaggcagcgcagcatgaaatgcctgatattgagcaggtaagaaaagaatgtatcgaggaattacataccactcacagctcaaaacgatatcctgcatattttgctacgatagcggttgtgactgtagttgtcttgtgtatgtgtatcacgccggtgaggtcatttgcagccgatatgattgaacatattcaggcattaattgatgttaataatgattcggtacgtgatctggtgtatagaaaatatagcggtccgactgtttatttggaaaaagatgaaacggtaagcatatactcatataccggttatgaggatgtatatattttgccggcggaggcaaaagaagctgaaaaactgggagctataagcagagatgttaaggtgagctataaagtgccgtatagtggggagtattatattcttgatggagaaaataaggagaatatcacagaccgggttattgtagaacatgagggaggagcagaagataatttgaaaatttctcaataaggaaatctttgcttgcaatataccctaccggggtatataatgctcttgaagacagatacccataaggggtatggttagacaagtaaaacaaatgcataatgcggaacaaagaacaaatggaggcacccatggcagaaaaagaaaccaaatgctgttgctgcaaccgcaaaaaagagcggtcagagaaggaatataaggatctcatcaacagacttagccgtatagaggggcagatccgtggaatcaagcgtatgctggatgaggattgctactgccctgaaatcatcacacaggtggcggccgcaaacgctgcactcaacagcttcaataaagtccttttggccaatcatataaagacgtgtgtggcagatgacataagagccggcaaggatgagacaatagatgagcttttgaacacactgcagaagcttatgaagtagtattataagaaggcgggtataaaaatgagtacaataatcacaatattaataatagcaataattgccgctctggtgattgtgggcttaaaggagacaataaagcattcaaagggcgagggcgcctgctgtggcggtggagccatgaaggaggacgaggaagccacagtacagcttacaggcgagatagttacgagagcagatgtgcacatagacggaatgcactgcatgaactgcaagaattcagtcacacgctcgcttcagaagatgagcggagtatcggcagatgtggatttaaagcatggcgtggcacatgttgaggcaaccagagagctaagcgatgaggaaatcacatttgccatcgaaagactggatttcaaggttacaggaattgagagattttagaaaaagcttctgaatagttagattcgaatagtagaaagaaggaaatacagacagtatgaagcaatatacagtttcaggaatgagctgcgcggcatgctctgccagagtggaaaaggcggtctctaaggttgatggtgtgacgagctgctctgtcagtcttttgaccaactcgatgggagtcgagggaagcgcgacagatgcgcagatagtggaggcagtagagcaggcgggctatggagcgagtcccaaaggcacagcaacagaatcagaaaatgacaaagcgaataacagcttagagcagctaaaggcagcgcaggatgcgcttgtagacagggagacaccgaagcttgtaaacaggcttatagcatcgctcatattcttagttgttctcatgtatttttccatgggacatatgatgtggggctggccgttgcctgagtttttcaatggaaaccatgtggctatggggcttttgcagcttctgcttacagtggcggtaatggtcataaaccagaagttttttatcagtggctttaagggcttgattcacggtgctcccaacatggatacgcttgttgcgcttggatctgcagcatcgtttggatacagcgtgtatgcactttttgccatgacagctgcgcaggtgaatggcgatatggatgcggtcatgtcatatatgcatgagttttattttgaatccgcagccatgattttggcactgattactgtcggaaaaatgcttgaagcgcactcaaagggcaaaacaacagacgctttaaaaagcctgatgcagcttgccccaaagacagcaaccgttgtaagggatggcgtggagcaggaaatttctgtggatgcagtgaaaaagggcgatattttcgtggtcagaccgggggaaaatatccctgtggatggtgaaataatagatggaacaaccgctgtcaacgaatcggcactcacaggagagagcatccctgtggataagcagccgaaagatgcagtaagcgctgccacagtgaaccagtcaggctttataaaatgccgcgcaaccagagtaggcgaagacaccacactctcacagattatacagatggtttctgatgccgcagcgacaaaggcacctattgcaaaaatcgctgacagggtatcgggagtatttgtgccggcggttatcacaattgcaatcattacaataatagcatggcttatagccggtgagaccgtgggcttttcgcttgccagaggcatttcggtgctcgtgataagctgtccgtgtgcacttggtctggcaactcctgttgcgataatggtaggaaatggaaagggcgcaaagagcggtatactcttcaagacagcggcaagccttgaggcaacaggccgcacacagattgtggctcttgataagacaggcaccataacaagcggtgagccgaaggtgacggatatcgtgccggatgagacattttttgagaaaaccggcaagcatgacggtgagtgtcagcgtaaggcagacgatttaaaaccgtactcatcaacagataaagcactgtggtcaaggaagcttcttgcaatagccgcatcagtcgaggccaagagcgagcatccgcttgcaaaagccattatggagcgcgctaaaacggatgaaatcgccgttgcagaggtgacggattttagcgctgttgtaggaaatggtctgactgcaatacttgcaggcaaaatgataaaagcaggaaatcttgcttttgtcagcaaatttgtaaaagtgtcagatgatatgcgcgcgaaagctgtcgaattttcaaaggaaggaaaaactcctctgttctttgccgcagatgacaggctttgcggtatcatagccgttgcagatacaataaaggaggacagtccggaagctgtcagacagcttaaaaatatgggtatcagagttgttatgctcaccggtgacaacgagcagactgccaatgccattggaaagcaggcgggagtggacgaagtcatcgcaggtgtgcttccggatggtaaggaggctgtcataaggaagctaaaaaaacagggcagggtagccatggttggtgacggaatcaatgatgcaccggcgctcacacgtgcggatatgggaattgcaatcggcgcgggaagtgatgtggcaatagatgcagcggatgttgtcctgatgaagagccgcctgatagatgtaccggcagcagtgcggttaagccgtgctacattgacaaatatacacgaaaatctgttctgggcatttttctataatgtaataggtattccacttgcggccggtttgtggtatcctttattaggatggaagctcaatccgatgtttggagcggcggcgatgagcctgtcgagcttctgcgttgttaccaatgccttgcggctgaatctgtgcagggtgtatgatcctaagcatgacagaaaagcaacaccagatagaaaaaacaaaacaaataaaccaaatgaaagtgaggaaaaatcaatgacaaagacaatgaatatcgaaggaatgatgtgcggccactgcgaggcaagagtaaagaaggcactcgaggcgcttgatgcagttagtgaggctgtagtaagccatgagagtggaactgcagtagtgacattaagctctgacatttccgatgagaaattaaaggagactgtagaggctgaggactacaaggttacatcaattcagtaatcagtcagacagtataacaatatgaagaaatatatagcattggtattggttgcagtgctggtgcttgggatttttacaggatgtggtaacaagggtaacaaggagacagaatcacagacggatgagaaagccactgagtcggtgaattctgcagaaaataatactgaggacagtacgcaaagcagtacagaaaatcagaatgtggctgacacagagcagctcaccacagaaaacggacaggagagctcagttcttgcctgtccgtcagtaaacggtaagctgcatgtggagggcagcaagctcgttgatcaaaataacaacgaggtgcagcttcgcggagtcagcacacacggtcttgcgtggtatccacagtatgtgaccaatgattgctttgccacgctgaaaagctttggagcaaacgtagtgaggctcgccatgtacacctacgaaagcggtggctactgcacagatggtgacaggcagcagcttgagacacttgtgcaaaacggagtgcagtacgcgttcaacaacgacatgtatgtcatcatcgactggcatgtgctaaacgagggcaatccaaaccgctacagtgatgtggcaaagacattttttgccaaaatggcacagcagtatgcctcatacaacaacgtgatttacgagatttgcaatgagccgtgcaaaggtgcgacctggggagatgtgaagttttatgccagcgaggtcattccgtcaatcagaagctacgacaaggatgcagtcatactgataggcacacctaactggagccagaatgtggatgaggcagtcaaggaccctgtcacaggctatgataatatcatgtatacactgcatttctatgccgcaacccacaaggaggacttgcaaaacaagctaaaatcggcggcagacgccggactgccgatatttgtatcagagtttggcatctgcagcgccgacggaaacggtcaggtggacatagattccgcaaacagctggatcagcctgctcgacagctacggcatcagctatgtgtgctggaatctgtccaataaggacgaaaaatcagcgcttctaaccactgcctgcgataagacaagcagcttcacctatgaggatttaagtgatgagggcaagtggctgtacggtgtgctcacaagtcatgtgacacaggtcttgaattaacgaaaagcctcagatgcgcgaaaagctgcgcacctggcaatgcagggataggagcatccatgcactcagccggcatgcacatgaggcagatgcagatacttctctctggtggcaagtccgccgcggatatggcgctcggacttgttgatatcgagaatgtgacgcgcctttgcggcaagctccgggtctatgcgaagcagcctgtcagcatccgtgatatctttgtgcacagtggatttactgatgccaaactgctttgcagcctgacgcaccgtggcattgttttcaactatgtagttggcgatttccaccgcccttgtctcaatatatgatttcaaaaaatactcctgcatattctgttgttacagtttatgcaggagtattttttatattacacacaggttgtaattctatttacgtttttcgtaataaaataagaaaacggtttcttaaccgcaggaaagctgtatattaagtgaattaagcatatgcggatgcgatgagctcaatacatttatcgtatccaagcacagagctgtttagcaccaggtcataattttttctgttgccccactccttgtcggtaaagtagcggtaatttacagagcgcttcttatcgacatcctttagcagctttttgacctcgtcatcgcttttttgatagagcttttttattcttgcagccttctcaggcttatttccctctataaaaacattcagcacatcatccctgtcagaaagaatgtagtctgcgcaacgtcccacaataacgcatggctctttttgcgcaatatccttgatgagcatctgctgaatattgaaaatctggtcggaaagagaaactcctgtgatgtcgcgccccacaaatgcatatgaaaaaatatttccggcaggtgcatattcgccctggtttgcgacaatctgctcagagataccgagctcctttgccacatgctcaattatttttttatcgtaaaactcaatgccacatttttgagcaatctgctcgccgataaagcgaccgccactgccaaactctcggcttatagtgattattttaaaactcatgatgaaacctcccagcctataaaagtgtttattactcattataacgtaattgcacataaaatcaaaacagaaatttaacaaaatcgcttgcagataagcactccgtaatctataatgacataagaatacatgttgcttttacgtaatcaatgagatggcagcagataacatatgttatgtttttgtaattgtttacaccacagtgtggcaaacagcaattacgtgacgtttcaaagattgtaaaacagcagcatagcgaataaacaattaggaggaaaacatggatcaggaaaaggtcatagtcatagactttggtggtcagtacaatcagcttgttgcgcgccgtgtccgcgagtgtaacgtgtactgtgagatttactcatacaaaatagacattgagaaaatcaaagaaatgaatccaaagggtatcatccttacaggaggtccaaacagctgttatgaagaggattcaccatcataccaaaaagagctgtttgagctgggaataccggtgcttggcatctgctacggtgcacagcttatgatgcataaattaggcggaaaggtaatcacaccggaggttggagagtatggaaagacagaaatcacatattctgcaaacggtgtgatgttcaaggatctgccatcagaatcagtatgctggatgagtcatttcgacagaattgcagaggctgcaccgggttttgaggtagttgcgcacactgcagactgtccaatagccgcaacacagaatgttgagaagaaattatatgcagtacagttccatccggaggtacttcacaccaagaacggaacacagatgatttacaatttcgtccgtggcgtatgtggatgtgcaggcacatggaagatggattcattcgtcaaaaacacaatcgacgaaatcagagagcaggttggtgacggcaaagtgctccttgcactttcgggtggagtagactcatcagtactcgcagcactccttgccaaggcaatcggcaagcagctcacctgcgtattcgtagaccacggacttctccgtaagaacgagggcgatgaggtagagggcgtattcggcaaaggcggttcgttcgacatcaactttgtccgtgtcaacgcacaggagcgatactacagcaagcttgcaggtgtcacagagcctgagcgcaagcgtaaaatcatcggtgaggaatttatccgtgtattcgaggaagaagccaagaaaatcggaaaggttgacttccttgcgcagggaaccatctatccggatgtagtggagagtggactcggcggagaatctgcagtcatcaaatcacaccacaacgtaggaggtctcccggcgcatgtcgatttcaaggatatcgtggagccactcagaaacctcttcaaggacgaggtacgcaaggtcggactggagcttggattacctgactatctcgtattccgtcagccattcccaggcccaggccttggaatccgtatcatcggcgaagtcacagccgaaaaggtacgcattgtccaggatgcagactggatttacagaagcgaagtggaaaaggcagcaaaagagtacaaagaggccaacggcgaggaaccatcatggatgccaaaccagtactttgcagcccttaccaacatgcgttcagtaggtgtcatgggtgatgagagaacatatgattatgccgttgcagtccgtgcagtccgcactgtggacttcatgacagccgaagcagccgagataccatttgaggtacttcagacagtgatgagcagaattataaatgaggtaaagggagtcaatagagtattctatgatttgaccagtaagccaccgggaacgattgagtttgaatagttgacgctgggctacaaagcccgtaaccacggggctttgcggctttgggtgtttgaaattgcattatcattgcatttttatatttctttgtgatacattgcagtatgctgattactggtataattagcaatactttgagaagctgactggtagctgagaaccccggtcagcttctttgcaatctcaatattggtgtttggatacagatgaccataagttcctagtgtcgtctgtattttttcatgtccaagacgctctttaatcagcagtggattttcgcccatgctgataagcagggaagcatgcgaatgtctcagggcatgaattttgattctgtggacaccagctaaatttgccaatttctctaatgctcttggaagcgttgttttgctggtgggtgtactgttataactcagtacgaatccacaatttggtaaaacctttgcctggaccgccttccattcttgtaattccttgatggtatcagcatcaatataaatggtacggttgcttgcctgcgtcttaggttcaacgaatttgtagtcattcattgttttatagtacagtgttttactaataatcagcatacctgtttcaaaatcaatatcatcccactgtaaggcggcagcctctccaatacgcattccagtcataaataaaagccagaacgagatgaagagatagtgctcgtagtagtcacctttgtacagcagggatattaccttctgaaactcctccaaagtccagaagtcgatctttacttttttagatttgatattgccgatcatgcgggcaggattcttctttgcaagtccgaggataatcgcccggtcaaaagctaaacataacattccctgaacaatgcgtacatagtttggactgaattgttttgccaacttgagctgccaggtctgtacatttatcgcttctatttcggacactttcttcttgtagaaataggcaaagtgtttttgaatggtcgagtaacgattcttgtaggtactttctttcacctgagttttgtaccacggaagatagatttcttcaataaactttttgaaggtaatgtcttccttcttatcagctaattcttccgttgatgcaagaatcaatttggaatactcggcacgggcttctttttttgttgagaatccgctgcggtatttttgaatctgttttccggttacaggatgatatccgaggttggctcgaaaataataagtgccgttttctgcttttttaattggatcttttgccatgatttcactccttactaaaatgcaaaaagcacgatcattcttgcttatcgggcaaagtaatccctaataattcttcaacggcttcttttggaaccctgtctaattttctggattgataataggtatgccccttttctaccataagttcctttgcttttttgataatatcagcagcaaaggaaggaccgtagcctaattcaatcaaatccctttttgttacagttatcatgaatctcctttccacagacagggaatcaacttgatacctgtctattattatatcaaattttgagtaaaagttctctaataaaagcgctataagctaaaatcccaaaagtctatgttattctttcagaagccagttcctatgcccgttccggccacgtaaaacggtgttactttgtaactattaagctgcaggcgtgcgaagatgcaaactatctgcagtcacctatatcaatctcccgaaagatttcttttgttttcaaggtacggcgaatggatatattacccattcaattaaggaatagggggcttttctttaagattgaaaaattttaagaaaaaatgataaaaataaaagctgccttgatttggcagccacggaaatctatttgcgttttagagccagacgattcagcatggaaatgagcgcaagcatatcctcgtcatcgagttgtttcatcagatcagttgctttgtcaatcagaggaagattgtgcagctctgaatcgaagaactgttgaggagtgacttccagatagtcacagatatccagaaagctctgcatggtaggcagagaacgtccggaagtgagggactggatgtagcttttatttttgccaagatccagactcatctgatattcagatacatttttctttaaacgcagttcgctgatgcgttctccaataaagtttttatccatacatttacacctctcttccacattttaaactatttacttacagcaaattacggaataaaatagagatatatttgaaatatagtgattattccgtaatataaccgtaatttactaaaatgatacaaaaaaagaaattatggatgatagaaaatggattttggggtatgatgatagcaaaggaagtggatgtctgtgcggattataggaaatgagcaggaaattgaatgggcgaaggaagcactgcggaatcaatgtaacgattgtccctacttggactgctgtaatgaaaaggcgaaagaggagtcaaagcagtgtggaacggttcggtttggctgccgggagtatctgaaagagaagattgaattcgtagtagaaaaatagatgtagtattttgaacaaatataaacaccatatatagtataagcctgaattgacatgaggaatatcttgtgctagtatactgatatagtttattttatgcacaccctttttggggagtttcgggattcataagaatctccaaacttacaggaaacagcaggagctgattcctggcataagtagtttatgtttgtagtgagtgtcacggtatgccttttttggctgcgtggcacttttgttttttcaggaagaaaccagacttttaagaatgaacagagaaaagactctcttttcattctttttttgtgcttacatttaggtttcggcatagttgcatgccacaaccagcttcggctgttgatggataaatattattttaagaaaggtggaataagaacatgaatgaagcaagagtgtatgcagatggatttgagagatcctttgcagaagtaaaagatctgctggagtttctggcagagagaggaagaaatgccaaatggatcagaaagccaacgaatacgttacggctggcaccactggaaaaggaggctcaaaatctggatgcggcagatgcatccatggaagaaattttggaggatacagagaagaatacgcagcttgtactgaaaatgagaggagaatcctatccggtacgtgactgtgccatccgcaccattttaagccgcgcaggtgtcaatggagacgggcttcgcaagctggataaggcaacatatgcgaaggtagtcaattactgcctgcgggttgcaaaaggggatgccctgattaagattgcggacggaaaggtttccgcagtacatggcggggataaacatgattattgcatccttgatatgaaagccatgtttgagacaacctgcgaatatctgaatctgaatttcaaaggcagtgtttacatggagggctctggtatctatgaccattccattgtatctgccatgtggaagctcggaggaagtcaggaacttctggatacttaccgaaaagcactggatgcacacggaatggatgagaagatcctgtcaccggcacttcgttttaccacatctgacgtggcagcgagcggtgcaaatctgtatccgatgcttttgacagacggaccaaacggcgttatcagtctgggaagtccaatcaagctggctcacgataaaggggcaacgattctggacttccggaaaaatctggagcaggtatgcgcccgctatgtggatgcgatgaagaatcttactcagcttatggacattgagatccgtaatccggtgaactgcctgaagctgctgatgaaggaacttggcattaaacagaagatccggaatgaggtggtggagctatttgtatcccagaacggggaaggtgcctgtacggcacatgatctttattatgccatgaatgaagcctccttttttgcagcctgtgaaggaatgtccggacagggcatcctgaagctggaggaggatattacgaaggcgcttataaaagactggaaaaaatatgacgtttatggagcagtcaaatgttaggaggaattggaatgaataacaaagcagagtatacaccggaaaaggttgtggatatcagtaacctgtcaagagaagactggttggaataccgcaaaaaaggaatcggcggcagtgatgtagcggcaatcatggggatctctccatttgccactatccgggatctgttttacaacaaaacaggtgtgcagccggtcattcaggaggaagaggaaagcaactgggttgccaaggaagtcggacaccggctggaagatctggtggcagaaatcttttccaaaaagaccggactggaagtatttccggtacgtgtcatgttccggcatccattatatccgttcatgcttgcagatgtggatttttttgttcgtatgccggatgggacatttgcgattctggaatgtaaaacctgcaattataatgcgaaagataagtgggctgatgagggtattccagctcattatgtgctgcaggtaaggcattatctgtctgtgatgaatatgcagaaagcctttatcgcatgcctgtatggaaataacgagaatgagtttgtgtatcgcaccattgagcgtgatctgattgaggaagaagacatcattgatcaggaaacgtatttctggcaggaacatgtattgaaaaatgtagtaccgccgcataacgggaattccgatctggttctggcaaatatccgtaattatggtggttttgcagacaaatctattccggaaattgtgctttccggtctggaatcaaaaaatcttgagaagtatcttaccctttcggaggaaaagtcacagttggaaaaacggaaaaaggaaatcgaagcagaacagcgggcaatcagtgttccttttgtggaacagctggggcagggctgcaaggcagtgctggaggacggtacgaaccgttaccgtattacctataatccgaccagacgtacttcggttgggaaagaccagatggagaagctgaaaaaccagcatccggatatctatgaggaatatacaaaaacaacggagagccgtactttccgaattaagaaggaggcggcgtaatgagaaaaccaaatgaacggatgcggataaaaagctggagggatataaacaatgaggtgcagatttaaacataagattttccagaatgaggagaatgggtatacgattgccatattcaccacacaggatacgtctgtccccctgtcagccagagacaaatatctggcatcccggaatatcatcggcttctcagcgattggattcggtcttccgcttacagacgagattgagcttgagatggaaggcagatgggagagcggagagcatggaactcagtatcaggtggaaaatttcatggaggttgtaccacggacaaaggagggtatcttaggatacctttcttccggtgcaatcaaaggtatcggtcccaagatggcagatactattttccggaagtttgggcttcagacactggaaatcatggaaaacaacccgcaggaactcttgaagatccgtggaatttccgagaagaagctggctgctattgtggagtcctatggaaaaaaccaggtgttccgggaactgatgacgtttctggcgccttttaaggtaacacccaaaaaagtgaatatgattctgaagaaattcggaaatgaatcggtggatattatccggcaccgcccttacatgctgagtgcagtcaaaggcttcgggtttctgactgtggatgcgatcggaagacagtgctgctgtgcactcaatgatcccatgcggatatccgggtgcatcggacatatcatgaatcaggcaatgaaagaaggacatctgtttaagcagcgtcaggaggttatcagggaagcactggaaatgctgaaccgggatctgcaggtcatggcagtatcggagcaggatgtcagtcaggtgctttaccggctggtgctgcaaaaaagcattgttgtggaggaagaacggatctattctatccggcagtatgaagaagaaacacagaccgcttccatgatagccagacggcttttggagaagccggttttgctgtccattgaaccggagctggaaaaggcacagaagacactggggatcacgctgtcagaaacacagaaacaggcagtgcggatggtgtttgcacatcccatcagtattattaccggaggtcccggaaccggaaagacaacggttctcaaggtgattctctatatccatcaggcgttatgcaggtcagaggtacagcttatggctccgaccggacgtgcggcaagacgtatggtggagagtaccggctgtgaaaatgcatccacgatgcatctggccctggggcttttgggagatgatacggattttgaaccggattttgagtacctgtctgccggatttctaaatgtagatgaggtgtccatggtggacatgcatcttgcctatgaatttttccggcgggttagcagacatgccagagtccttttagtcggggataagaaccagcttccatccgtaggagccggggatgtgttccggcaactgattgcctgcgggctgattccggtcacggtactggatctggtttaccggcagggcgctttgagcagcataccttataatgcaaaactgatgcaggagaataagactaatctgagctttggggaggattttcagttcattgcctgtaaaggagcagatgaagcggcagagattgtccggaggatttatctggacgagattgcaaaaaacggcatggatcaggtacagatcctgactccgtatcggaaacgcagtgctgccggagtggatgaattgaacaaatctctggaggattttgtaaatccgccaatcgcagggaagaaggaactgcatatcggcagtcaggtgttccgggttggcgataagattttacagaataaaaataccgagatggcgagtaacggcgatctgggcaggatactggactgtatcacggatgaggatggaaatgccagggcagtgatcggattcccggatgggcggcaggtgcaatatgaagctgaccagatggaaatgatcgaacatgctaacgcaacaaccatccataaggcacagggttccgaatgtccggttgtcatcatcccttgggtaaaagccttttatatgatgctgaagcgcaatattctctataccggagtgaccagagcgaaaagcaaggtttatctggtaggggaatgggctgcagtctgtcaggcaatccatacggatgacagcgggacaaggaacaccattctgagtgagcggatcgtacagtattacgatcagtatcagagtgaacagaaaccggaaatggagcagttaaaacttgttgtttaaaaatatttttcaatttttgaaataagcggactattactcttatataggggaacgtctgcttttctaaatgaaaggagcagagaatgaaagaattattgtataagaaatcagaggcagttgccgctttgaaccgtgtggatggcttccatccgatggaactggcaagaaagattggagaagaagggcaggaggagcagctttatctggatgtgaaataccggaagctatggtttcgtctggtcaatccggcaggaaagatcatcagccggattatcactttcacagagaacatggcagttgtggaagcacgtatctatctggataaatgtgatcaggaagacaattatgtagccaattccttttcgcagaaattccggagcgatgacccgaagtttggagacaaatttctggaaatggcagaaacagcagccgtaggaagggcattatcggatgccggatatggtgtgcagtttgcggatgtgggagaggaaaatgatcctgcacaggtagatgccggaattccatatcagaatccacagatgccggattcaggtgccatggaaaatgcagccatgccggattcgggtgtcatgccaaatgcccctatgccaacttatggagagatgccaggtcagccggaatatgcaggccagcagatgatgaatcagttctatcagcaggcacaggcggcgggaagcaccatttaccatggcagtggacaaatgcctggctacggttccgctccggctgcctctacgccgccaaagaccggacagatgctgcagggagcattacagaatctggatacgtcccttccggtagaagaactgatgaaacacatgaactatgaaatggcagtcgggactgtgattccgggaaagggaaaatacggcggaaagaccatgggacaggtggcagttgaaagcccgtcaacgatccagtggtttgccgagcaatattccggaccgaacaatctggttccggcggcagcaaaggtaattttacaaaaagcaatgccgatggctggttaaggaagaaccccgcagagagcttttttctgcgggggaaaggaggaagagaccgggatgtattatgatatgtctgggtttgattatggaatactggatgtggtgcaggtgctgcatctcagaaagcggcggggaaactattatgactgcccgttttgtggagagacgcatggaaaactgaatatcaatgtggaaaagaatgtattccggtgcaaccgctgtgatgcgtccggggggatgctgaagctttatgcggatttgcacaatgttacactctccgaagcaaatcagcagatccgggaagcattaggaaaaggagaataccggacggattatatcaaagcaacgccggtacaggaagaaaaggcaacggcagagcttgcacccatagaggaaatccaccggacgtatcagagaatgctgtccatgctcacgcttaacaggaagcatcaggaggatctgcaaagacgaggattaaaaccggaacagatcgaagcacagcgttaccggagtgtcccgctgtttggaatgaagaagctggtcaaaaggctggcagaagaaggatatatggtgaaaggcgtgccgggattctaccgggatacagacggaaactggacgattaacttcaaagcagaaaactcaggaatcctgattcccatagtttctttggacgggttcatccagggttttcagatccgggtagatcatgtgactgacacgaaaaaatatatctggctgtccagtgtcaattatgaccagggagtttcctccggaagtccggtacatgtgatcggtgatcttgccgcagaacgtgtctatctgaccgaaggagccttaaaagggaccatagcccattatctgtccggcgctacctttgtgtgcgttgccggagtgaaccagtaccggaatctgaaaccggtgctggagcggatgaaaggatatgggatgaaacagcttttggaggcgtatgacatggataagaagatgaaagtagcctgcaataagcatgacagtaagtgtgcggtctgttttgagcgttcccctgttatctgccagcataaggcggagaaacggaggattatccagaacggctgcaataaggtctatgaaatctgccgggagctttccctgccgatgaaccggatggtctgggatatggacgagagcggggagtggaacgggaaacacaaggggattgatgactatttagccgccatcaaacagaaggaaggaaccggggcacagacttcggctcttccgaaaggagaacaatcatgagaaaaaaaggaaatacggttcttgcaggactcattatctgcctgttgcttgtttttctcgcagcggcaggaaaactctttggtgcttatctgaagtatcagaaaggggacgtaagttacgagaaactgcaggaatatgttcaggaaccagaggaagaagaatcaccggagtctgagaaagaaaaggaggaacctaagaataggtatctagaaattgattttgcaggtttaaaagcggttaatccggatgtcatagcgtggattcagattccggcactggatattagttatccggtggtacaggggaaagataatgcatattatcttcatcaccttttttcgggagaatccaatatcaacgggagcatctttgtggactgccataatcagccggactttacggatcagaatacgatcgtgtacgggcataatatgaaaaacgggagcatgttcggaactctggataagtaccaagacaaagagctatttgaacaacatccggagttttatctctatttgccggacaagatcctcaagtatcgtatcttttcctgctatgcgggaagaaccggaagtgagggatataggtatcatttcccggaagcggaagattttcagacgtttctggatacggtgtcttcttatagggattatgataccggcaccgagctgtcggcaacggatcggatagttacgctgtctacctgtgtcaattccagacggaattatcgctatctggtacatggaaaattaagcagtgagatcatcacagaggaataaaagaatcgtgctggtgtgagaagaaatttcttatgccagcttttattatgggaggaaatgtaatgggaacagcattggttatggaacatgcaaacgcactggcacagatgatagtcagtgaaaaggacaagttatttgatgaaagagtggaggctcttgtaaaactttatagaagggcggaattttatctgaagcagggatttctggagagcatcgtctgcgagttccatcggaagaaagtggaaatgattatgcaggcggaaacaaaaggagagattacggaaatactgaagttatcaaaaccgcattttgacgggaaaaaatttgtctatacctctccgtatgctgtggaagaggaagagcttctcctttggtctctgacatcactgcaaggtccactccgggatgaagggtatcgaagatatcgggaattatttgagaagtgcctgccggagatggcagaaaagattccggcgtagaacaatggcataacaaaggaacgaaaaaactatcttttattttactgtaatttcactctttattgaatctgcaatactttacaaagttttttacggaaaaatgcttcggattaatatacttaacaccagtatctatcagcttaaattttgaataaccaaacaccagtgtttcattattcacaaaaatcgtcatctatccagaaagcaggtaaaatatgttcacaataatcagagtattttctgcattcaatacattcttcatctaaagaatctacgccgacataatgaatatgataatctacagtatcgtttacaaatctttcaaggaagatgttcaaaacaaaggctactctatcatcacaataaacataaccaattaaattcttatgaatgatacagtaaacgagataaacacagcgtgtatcaacgatgcagttgaaattgtatccagattaaagcctatttatactttaaagcatgcacggagacagcaagaagacctattcctgtacggaagaggtcttcctgtccttatactaaagttaattggtatgctgaagtcccgcaaaagcaacatttaatttacctccagattaccgcttttaagagatagataatcggaacttccgctaagcagatagaaaaaatattcccctttttcatctggtgagaaactatattttccactcagttcatcgaacacttctccttcatacattatcccgtcttttacataaccgataatcaaatcttgggatactgtaatgtctgatttatatttatcaaacgaaatgactatattatctttatcagttagttcccatccctttccattgtcttgtgtaagtacacaaagtgaattgttgattagaattatttctggaatgatatacatttcatctgatttatcagtaggaatctctactattgatgatggtatgaaattaggcatcagactgcttttaacaattctgctttcaggaaattctgatgaagatttggctaattcctcaatatcaacaactttccccttttcattggtatatacaccgtcttttaatatgatgtagcttctatcattggtttctgtcccgattaaatgtcgattgctgtcatcaattaaagccgatgttaacagatgactgattgcagcatatacaggcatacacaaaaacactgaaaccacagttacaataattgcagttctataagtgaactttaaaggcttatgttttgaagctgttttacaaaatacattttgacgtatcttttgtttggaatattttttcagtattttattgcaatcatgaaaatacacttcctcaataaaagattcatcaatttcactcattaactcattcaaagaaaattttacagtcttcatatctaaatcccttcttttccatttttagttttaattttttacgtccgcgtaacagtttggattttactgtagattcttttaatccggtttcttctgctattacagcgattgtcttagtgtaatagtagtacgagataaaacattttctttcgtcaactgatagttcatatatgctttcttttaagcatttgattacttcttcttttaacggcccgtattcaatatgttcgttcgttccaacctgaaacgcatcttcgtaattttcaaaatgcatcttagaggtttttcgtaatgcgttttttgccatgtttcttgcgattgttcctaaatagggtttgaatgtgctgtagttatctgtatctaaatctgcactgtaattccatagagctacaaaaacattagacacgaccgcctccttgtcttcatatggcaaagcacttccaataatattctcgactatgtatacaacatatctgtagtatttgttcatacatatttttaaagcgcgctcatctttattttttagttcgagcatcagttgtttctcatctatgttaaataacatgcttctacctcataaattcagtgaatactatagcagtggtttaataatgggaatgtgtattttcaaaaaagggaaccgagaaaccaagttaaaaagcttcaattaaaatcaggataagtactcaccagcacttgaaatattttccactattaaaatgtaatagaaaatgatttgattgtaaaggcatcagaggacagattagttaccatgccgtaatagtaatctgttgcctgtgtcgtaaatcctgaacgcaaaccacttgctgtaatctcacgcacaaattctgatgaaggtccagctacgtatgcgcgtactcttgaacgatgaaaagcagaacggctcaaagtgtaatttatagttatgtatctgccgctattacaataaagtcccatactgttatttgatggtgttaatatggcgacttcgccatttttcaatgtgattccgcgccaagtatatcgggcatatgcatttggaataacaccttcttcaacaactttctgcaggctttcgttagcaaacacagtgtacttccattcaatcatattagggtcatctgtaagcggctctgctgcaaaaacattaacacttagcgacagcatcataacgagtgttaggataaaactgattatttttttataagccttcatatatgtacacgactcctttccaaggttccctttgtaataagatacacagtaaatattgtaacggttgcatttatttaaaaaattaaaaaagataatttttaatttttgttttttgaattttttgattggtaaaataagaaaatggattataaagagttgcactctgggtacctcctacgtacagaataagtatcaaatacaaaggagtgaaatcattatgattaaaaaattaagagtagccgtggatcacgggaaccggaacatgaaaacctgtcattttatctttaccacaggactgacggaacaggataaaaagcctgccaggggagagaagtatctgaaatatcagggaaagtattatacccttagtgagaagcggattccgtaccagagggacaagacgcaggacagccggaaccgattctggattctgactttatttgccattgcaatggagctggagcagaaaagccagatccagccggaggatgtcattcaggtggaacttccgattgggcttccgccgaagcattttgcagagctttgtgagagatatgaacgctatttcaaaggggacgggaaggtgcaggaactgtgcttcaacgataaagtctatcacctctgtatacagaatgtaatggcgtttccgcaggattatgcagccatgatgacgaggatgatggaaatccgtgagattccgaaagtcgtagggattgatattggcggatttacttctgattatcttctgatgagaagtggcagaccggatatggattattgtgattctctggaaaaaggtgtgattaccatgtataacgatatcatttccagtattaacagtgaatatgacatgcttctggaggaggcagatatcgacagtatcatcaagggaaaaacgcagtattatgaggaagctgttgtacaggcagtagaaaccatggttcagaattttgttaccgatcttctgaacagcatccgagagcggggcattgatacaaaatctacttatacggtgtttatcggcggcggagcagtgcttctggaacgatttctggagcaggcagaccggttgggaaaacatacctttatccgggatatgaaagcaaatgccgatggatatgatcttttgtatcgcatgacacaggctggagtgtgattttatgggaaagaaaaatccgtttgtattcactattggttttgataagtcggatccagatcacgtgtatgtgacagaacttctgaatacgacagagaaaaaagcaaaactgatcgttgcggcaattctggcatatacgggaagaacggatgagacaggtaatggcagtataagcatggaaccggatatgctccggccaatgatgcagcaaatcatccgggaagaagtaagaaaggtattggaagggcaggacgtttctaagataaatagagaaatgcccacagaagttgatttgatggaagaagaaccgctgcggatggatcagactatgagacagaatgtagtggatgctatcagtgcatttcgcagggcataaaaaagcaggagagatacacatgcttatggcagtgtactctcctgttctttgtatcagaatgggaatagacagaaaactcacagactattcacagattactcacagattgtctttgtataatgtgtagatgatgaaggatacgggagagccttaacttaggttcttgaatccatccagaagtccacgcagtgtagaaagggcaagctgtttctgctcctccgggcaggaatttagttctgccatgatttgctgcatggtagaatccgggttcgttttctggttagaaaatatagcatctatggaaatatgtaagtaagttgccaaggcataaagtgtttccaactgtggattgccaatatagttttcaatatcagagacagtccgtaaagaaatctttgcctgttccgcaaggctgttttgcgaaagattgcggcggagacgttcttccctgactgcatctcccaataattttttcaccatctatatcacctcacttaatgcatatattttatcgtagattaacactatacgaaatgcgttaaagtgcgttatgataagcaggataacacatgcacaaatagagaaacatggaagtaagtacgacagacatgaatggacagcataagataaaagccaaagaggaactgaatctgttaaaaaaatcttatccatacaatgtgtcggagagaagttagaatatgcagtatatgagatactatcatcgcatatcctacacaattacatagaaagagaagtatcggctggactacgaatagagtggtccagcctttctttttttcgaaaaaatgaaggcagtgtcacgttttgttgccgctcaccgccatcctcggaattttttggaacgtgataaaaaatttcggaggataaaacaaatgaacaaaaaaacatatacaggatcaaagatacaaaatcactttacagcatatctgatacagtttgtccgtggaaaacgacatgattatctggagaagaaaatccagatggctgatgcagaagaactgttggaggatattggacagatggaggcaagaattgtaatcgaagaattgctggagaaccaaacgagggagcagcttttattgcaggaggcacaggggaaatatccagaatggaataagatgtcagatgaaagactgatgaaagcgcttcatacgctgcgggatgaagaacggaagctgatttaccagcatgtgtttgaagaacgtacttttgaggaaatgagcaggctaaacgggttatcagaggagcgatgcaagggtatttattattatgcaatccggaagatccgcaaggtgatgggaggtgaaaactaatgaattttgaacgattacttttaaaggcaaaagaaggaaatgcagatgcggtactgaagattttagagatatataagccgcttttaattaagaatgcgattgtgaatggcagatttgatgaagatctgtatcaggaactggtaagtacattgcttcagtgtatccagagattccagataattgagtaagttatcttaaacaaaggctgcaatcactctcaggggagtaacatcctctgggagtgattgttttttgaagggtgatattgcctcagttcgaagcggcagacggtgttgatctattatgttgcctgatgctttaatgctcttttgttgttgccagttctttatgaagatgtagagccataaacacagtaacaatagcagaaattacatcggcaatcggttgtgcatatagtattccatttatgccccagaatgatgggagcaacagaatgatcggaacaaagcaaataccttgtcggcaagccccaagaacgaatccggcggtgccttttccaagtgcaagaaacagagaagaatacactgtgtaaaatccaaatacgaagaaggaaaatccatttgccattagcgatttttgacctacagaaatcatctctgtattgccttctgtaaattgcgaaataatctgtgtggaaaatagggctattgtcaatcccacaactacacaaaatattgttgaccataagatagaagttttaattgcttccctgagccgatcaaactttttggcaccatagctaaagccggcaattggttggaaaccttttaagaagccgaacacaaccagagttcccattgaagtgattcttgtaacagcgcccattccggcgataacagcatctccatagatattagcttcccggtttatgaatgcgatagaaaggcttgtaagaagctggaaagtcaatgtgggtataccgattttcagaatttcagttatgatctgcttagaaggacaaaattccttaatggaaaatgtaaaagcgctttttttctgtaatgcataaattaaatatacaagagtagaagccatttgagaaattgctgtagcgattgccgcaccagcaacccccatgtcgagagtatagatgaaaataggatctaaaccaatattcaatacagctcctaataataatgcacacatagttgtttttgcggcgccttcacttgcaacgatattgttcatcgttacattaaatacattgaaaatacatgaaataacatagattcttccataagaaagggcgtatggcataatcgtgtctgttgcacctaacatggttaaaataggtttcaaaaaaattgcagttccgataataataactgcgccaatacaaacactgctgtataatgcagtactggcgactttacttgcagcttccctatctcctcgccctaaaagtcttgataagtaggaggcggcaccattgccaaacatcagacctaaaccaacaactacttgtcctaaaggaaacgcaatggaaattgcacccatttgactctcgccaagtcctcctatgaaataagcatccaccaaattgtagagagcgttaataagcataccaatcattatcggtataccaagagccattagtgcttggggaacaggtgcatttcctaataaatccattttgttgttattcttgttcatttcaaatactcctttcaattaagaatataaattatagtagtataaattatagtatactacgtgagagaatactactataatttatagtagttgtcaagcgtgtatcctgcaatttccttgacaagaggtataaaatcaaatactataaattacagtatatataaccgtaagtattttatagctttcgtggatatagaaagtgggtgaactatggctacaatagatttaattgtgttaggaatattgaaaaaggaaccgatgggagcctatgatattcaaaaattagtggaatatcgtaatatatcaaaatgggtaaaaatcagtacaccatccatttacaaaaaagcaattcagttggaggaaaaaggcttcattaaaggagaaattgtgaaagaaggtaagatgcctgaaaaagcagtttattcattaacagatgaaggcgaaaaagaatttgtaaagcttatgatggaaacagcctctaaacccattcacttttttttagattttaatgcagtaattgtaaatttggataagttaccgcctgaaagtcaacaatcatgtattgccagtattgaggaaaatattgaaatattaaaaacttatctggaggaaaatcttcgagagaaagagaatgatccggaaatccctaagactggtatggcagtattgcaacagcagatagttttggcggatgctattgaaaaatggattatttctctaaaaaaagacttttgatgaagaagtcactagctgatttcttattaggtctgcaggattgggaagaaacagggatggatgccgacctatgttccggctttgtagccagaacatagaaattttcttagtggggaatctccctcaaacccggtgctccttatatcctgcagattaaacttcaaatttatacccatatccaactactgtttttatgtaattcttgtcgctggaatacttttttatcttcttgcgtatttgaaaaatagtgttttccacggcgtggaaataaccatttgctttttcatgccaaactgcttcataaatctgttgtttagtaaaagccatccctggattagaatatagcatataaagtacatcaaattcttttacagaaaagttaatgtcttttcgtactattaagccgtaggtcgtaaaggtctgcgactttaactttacccggaaaggagctgccacatatataggcagtgctgtaattttaacagtaacggtcaccaatctatggggatggcttgtatatccggctgaaatgctaaaaaatcagtggttcttatttatcacttcactctgccccggtaattatgtgtttgccgtttctggctcttgcagctattgcgattctactggtctattaccagactatttgcaggtaaagcattgctctggttttgaatttgagttttggcagtctaataatagcattttagattagctgtgataaggtgaaacagattaggaggaaagtaaattgcattacaaagacaaaaacctacagatagatattcgctgtcatactgtttttatgaatgatcaaaagattgaattgagtctgaaagaatttacggtactaaaatatctaacagaacatcctggctgggtattctctcacgaggagatttatcgtaatgtctggaaggaagaaccgattgactgtgctaatgcggttatgtgctgcattagccagcttcgtaaaaagttaaaagtagattcacggaactggaattacatccgcaccgtccgaggtgtgggctataagtttcaaccactctcaggggagtaacatcctctgggagttttttgtcatatttgttgcacttttcggctctggtacgtacagaaatagaaaagaaacatatcccaaaatgtatacattttagaagtacgttccggaaagagggattatatttcaaaaaggttacacacacagttttgaaatataccaataaaagtgtggatattttgggacatggaaaggagaaatgtggatgcagatatatggatatcaccgtaccagtacaaaggagcagcatcttgaccgtggcatacaggaaattgagcggtactgtaacgagcatgagatggcacttacgaatatttttacggatcaggagacagggaagaattttaatcgtccgagatataccgttttagtggaggatgtcctgcggccgggagatattttgattgttacagaattggacagactgggaagaaacaagtatgacaccatgcaacagatccagcggattaagaacatgggagtgcggcttatggttctggaactgccgactacgcttatggatttatctgtgatggataatgcgatggcaaggatgatgctggaaacaatcaataacatgatgctggagctttatgcttctatggcgcaggcagagctggagaaaaaggagaagcgacagcgggaagggatagaagcgaagaaattgcggggcgaatgggatgattatggaagaccaagtgtgatgaagcaggaaacttttgatgagaactttcaaagcgtagtttctggagaaacgacacctacacagcttcgtaaaaatttgggaatgacgcactcaactttttatcgctatcgaaaaactttttatgaaaaatacccggaactttcaaattctgcaaattaaagtcctattacttatatagaccaaagaatttcaggaggaaagaaatatgagtgaaaagagaataggtactttaatttatgatccatcaatgggaagatttgatatccggtttgggattgaatcttattatggaggtcttcattgcggagaatgttttgatgtgaaggtaaaggatgcatggattccggttcggattgaaatggatgaagactggtatctggtagggcttcctaagacgagtctcagtggactgacggttcgaatgtaggaggagcatatgatggaagctaaaaagaaatatgaaaagccggcattccgattggtgacagatttggggagtattttggaatgtctgtatgaggtatatggaacggatggaacgatgttgattgctgggaacaagttatcggatacggtaatctatccgtttatccgcatgattaaaaagaaatgcaaagcagtggatgcggaaaagctgaatctgatgctctggaagatttatatggtaagttcgagaaaagaagaatttgtgacggctgctaagaaagagctgcagccttatttgaccaagaaagatgaaaaacagattgacaccacatatgacaccacatatactatagataggaggcattaaagatgtcgaaatgggataaactattgacaagaatttgctcattatcgaaagaccttcgttttgatgaactaagaaaagtattagaaagttatggatatgagataaatgctccgagaagtgggagcagccattatacattccgtaaagcgggatgccagccgataacaataccgaaacacgaaccaatcaagaaaatttatgttgaaatggtaaagcagattgtagaaagtgaggcgaaaaacgatgaagacactgaatgattatttggcaatgtcctatcgcatggaaattgtggaagataaggatgaaggtggatttgtggtttcttatccggaactgccgggatgcatcacctgtggagagacgatagaaagggcagttgaaaatgcagcggatgcaaaaaaagcatggttagaagctgcactggaagaagggattgagattcacgaaccgggaagcctggaagagtattcgggacagtttaaaataaggatgccacgcagcttacaccgggatctggcggaacactcaaaaaaagaaggcatcagtatgaatcaatactgtatatatcttctttcaaagaatgatgcgctgttagtaaaataaatatacaagaatatagatgaaaagagccgtccggatgggcggctcgaagtattctttctttgattaaaaatgatattgttctagcagatagataggaagtgtttgtacgtttccaacggttccgcctttggtatcacctttcagatatagtagtttattggccttcccctgttccaatgccttcaaggcagtagatgcagttcccttaccggctttaacttcaatcagatagcggatgtgagttttcaatgtctgagctacaaaatcaatttcaccacctttataagtagcaaaagccggtgtctcaaagataatttcttccgggaattcctggcgtttggacaagttaatgtaaacatagttttcgttcaatgagccatccatagttgatacagtagcaccagttctggagagataataatatgcaactccaagatccatgaagaagcagcggcttcccggtttgaaattcaagatgtccagttctgtgattttgccacagaaaccgatgattccagaatggtaaagccagttgatagcacgatagcaggttgctttagaaagattactggagtaattctttgtaacgagcttttgcagttcttcacttatactgtcctcatctaatcctttcttttcacgaagcagaatacggcagatgcttaaaaagatgttggtaaaaacactaatatctgtgatgtcatcaaagtaccgcatagattcgtttaagaaaatgcggatgattctaacaagctctttttgagctgcttccacgtcttttgtgttaaggtatgtttccacaacctttggatagccgccaatctgtctatagatgtcgtaaacattctttaattcgtcatatagttccggtacggtgtcatctgcatgatccagtggaagtgatagatacttctgaaaaagctggtcatccaatgcttccaaaaactctttaaaggaaagggtataaatacggatactggtaatatctccactggagaatttgaattccggttccagtacacgtcccagataacttccagttacaatgaaatgcgcttgaaaatagcgggtaaattctcggatacggttgaatatctctgaggattcctgaatttcatcaataatgatgactgtatcgttggtatcttcaaaatccggatcgaagagtttaaaagcatcgtgaagcggctgctccggtcgttttgtaccgggagtccagtctgtggcttttttgtaacattccataaattgtttgccggacaaatcaaacaggttaatgtagatcttgtgcctgaagttctcatccgcaaatttattgataatatatgtttttccgacctgtctggcaccattcacttccaaggtgctgtggacggtatcgtttttccaatccagaagctgatcgtaaacttttcttttcagatacatgggaaatgctcctttctttcaactgttcctattatatcaaaatatgaatggataatatagagggtaatttctgataaatgatgaattgtctagtctgaacagttcttcacgggtattccggtttctgtcattactttttcgtactgaagaagctgttcccaggtcagccattccggtttctgatctgtgggaaaaccattccataattctttcatacgggcaatatggttttgaacgctatgattgcataggatagacggactgcgatttccgtagcccagatagtattcacagtcagactgtaatttacttaacatccggtactcgaattcataggaacttctttgatacggagccggatgaaatgtgtactcctgctgtatgggatgggaaggttctccatcaatatggttaaaagataaagaataaagattcggttcaggctctttgccaaggtcaatatccttccacaactttccgaattggtccttatataccggacaggaaaaatcatccatgccagtatactcaagcactaattttgtttttgcattttcattcattctattagaccatcctttcctttattgcagacattgaggtatattattgggcgctgtttctgcattccactgcagcttcgcacgtacatccatcaggatgattcctaactggttttctccgcagttattgactttgccccagaaatagtcaccccagttgtttccttcaataagtgtggactctccggttgcaagaagtttatcccggagttccgggttctgcatgaatttgcacatgcagatttcatacatgagccggactttcactttttcccagtccgggcgtaatgtaagatctctgccgagtttctttgcatcagaaggattatgcatccgaaaaatacagaatttgcgttgctctctcgcagagagtgttttctgcgcttgaaaagcagcttcattatttgcataggtttgtcccatgtaagagaccggtgccggatagaaattgcttagaaaagcataatctccccgaaattcattgatctgtgtaggtatgcgcttgcttgtatttgtttgattcattataaattcctcctttgtaaaagaggtgcggcctttcagccacacctcaaaataattctcatctattgcagagatggttatgcaatcatctccaaaaattcagcttctgtaagaattggaataccaaggctctgggcttttgccagtttgctgccggctttttccccgcagatcaggtaatcggttttctttgttacagagctgccaggtttggcaccaagctccagaatcttatcgttgataccgtctctggtaaaatgctccagtttccctgttgctacgatggtacatcctgtaaatttgttttcttttgtcataatggtctcttcctttctttgttcaaatgtgaattcgttctgtaagtttttccataaatcaagatttgcttcatctgcaaaccaggaatggatgttgtgatttaagatttcgccaaaatcctctaactgagtgaagtcgtaatctccgacagccgcctgttcaaatgcagttaaatttccggaaaatacggtgtccagaatccggcttttggttctgccgatcataggaatatccatggaaaccagatagcggacaaagctggtcctccggctggcgttgatggattcccacaagcggtcgaaagatttctcaccatatccgtccagtgccacaatatcttcccggtgttcctccagatgatagatgtcctgaaaagagtgcagatagcccagattcaggaatttttctaaagtggcttctgacagtccttcgatgttcattgccttcttgctggcaaaatggacaaaccttcttgtgatctggctgtcgcactgcggattatcacaatgcagagtttctacggtgcgaccgtcgctggtcttacggctgtaggttctggttttggaaccacagcaagggcagaccggaggcgtgatgtcggtataccttccacgatccagattatcctctatatgtgggatgatcatgtttcgtttggaaacaagaatccggcatccgggtacaagctccagatttttgataaaggtcagattatgaagggaagctctggaaacatcacagccgtcaatctccacggtatcgaagatgccgaccggagcaatctctccgaatctggtcggtgtccattcaatttcacgcaagaaagtttcgtaggtatcatcctcaaacttataggcgaggccgtccttatagtggtgtccggtttttccgcagcttttggagtagctgagactgtcaaaaatcatgacaatgccatcgataggaagatgtaaatttgctgctgtggataccaattcctgaatgaatttctccgcatattcttttgaaagtccggttcctgaaattgagaaaaacgggcagtaaccaaagcccaggtgtgttaaaccttctaatttgcaggctctgctgtccgggaagggaacatcctccattccttctaatacattgaacggaagaaagcgaacacaacgtccgatacagttcttcggatcaagacttcgtactgatccggaagcaaaattacgtccgtttttataaggttttccatttccatcacgcagagtatctttcagacgttcaaaatcattggttggtataaaagactcaccggtaatgaccagacgttctttgtgtggaatggtaagcggtacatttaaaaatgccgggatattgtgtgtaatatcttcccccacttcaccatctccacgggtagaagcctgaatcagtctgccatcttcgtaaatgagtttggtagtcaaaccgtccagtttcagcataaagagaacttcctgtcctttcatgaaatctaaaagctctgaaatcagttttgttttctcaagcgagagcagtggaatcggatgggtgactttggcaagttcactgaccggataatatccaaccgtctgtgtcggagaatttgacaggatgaaaccagtctgttcctccagttccttcagttcgtcaaagagtcggtcatactcggcatcagataccagaggggcatcctgattgtagtaggcatgacggtattcattgagttgttttacaagattcttaattcttttgactgacatagagtctcctttcttttgtggcgtgccagttccggaatcatttgtttccgtaatcctcctttccctgcgttcaggcataaaaaaagagaatgacgcttatgttcattctcaaaatagatgcagtttcctgcaaaataaaaaaagccagaagtccctgctgcttgttgggcataggaaaactcctgactacgtttcaaacctaaactgcgtgtgataaatcctttccggattgacacaaataattgatataagaacagtataacactagatgtagtatatgtcaaatgaaatagattcctcaatgaagcttttgccttatgttgatgacaaatttgtcggctacaggaataaaagcgttcaggatttcagatttgccctaagcgaaggaattcgtagccaggtattttttgccactttcgtggagaaagtcgaaaaccagataaaatcaatctctgtcataaatgcctctaaactgtttttacatcgtagtggttatgcaagttctaaatttaaaaataattttcacgaataactaacttttctatatgctgaattgtcataaaatatagattattaaatttgaaagcagattgaaggtgataaacatgagaagttataaacggtataccaggcgaaagagacttttgaagcaaatcgctgtggttgctttatctcctaatcgggtattcacgaaagaacagatctatcagcatatctatgaggaagcggagtcagaagtgaataaccgaatttacggtctgattaagaacttgagaaagaaaatagaagaaaatccggaaacaccgcactacatagaaacgatacgtggtgttggttatcgctttcgggcataaaaggagccgtccggcaatgggcggctcgaagtgtttctcttgttgtttatttattgtttttttcgttgtatactgataaaacgaggtgataaaagtggcatatagaattttgatcgtggatgatgacatcgaattattaaagatgttaaagaactattttgaaatcaaacgatatgatgtaatgatggcagaagatggcacagatgctttggaaaaaatccataagaaaccggatattatcttgctggacatcaatatgcctaaaatagacggattagaagtatgcagacgtatccggggcaaagtaacttgtcccattatcttcctgacggcaaaagtggaggagcaggacagggtaaacgggcttttatccggtggggatgactatatactgaagccgtttagtctgaaagaactggatgctcgtattattgcacatttgaagcgtgaggagcgtcataaagggaagtctgaatacagattccacggagacctcagtattgattatggagcaaagagggttcagatcggtgaaaatgatttggagcttacgaagctggaatatgcaatcattgagtttttgtccatgaatccaggacaggtttttgacagggagcggatatacgaaaaggtgtgtggttatgatgcggaaggtgacagccgtgttgttacggaactgatccggagagtgagaaagaaactggcggaatatacgcagacagaatacattgagacagtatgggggatggggtatcgatggaaaagataagaaatttatccttgaaaaagacaatggttttatatacgatactcagcttgattgtcactttttttctttctgtgtcaattattgagattgccgggcagatacaggaggaggtctggtggaagtacgtggatcaggacgagtattatcaggcaatgaatgaccgcaatgaaaattttgaggtagtggtaccgagaccgaatcagagtaaaatgagcagaatggactggcatatttcagaaacctgtgatttccttcagacgtacggagtattgcttttttcttttgccggatgtggaattgcggtcagcctgttttacaaaaataaattaaagagaccgattcaggaactgaagatggcatcacagatgattgcggaggaagatctggattttcatatggcttatgagaacgaggacgagatggggatgctgtgcagggaatttgaaaggatgcgtgggcagttggaagaaaataaccgtagactttggcagatgatcgaagatgagcgggtactgcgtgcagcgattgcccatgatatccgctcgccgcttgcaatcatgcggggatatcaggaaatgcttttggaatttgttccggaagatatgcttgatcaagagaaaatgatggagatgttaaggggcggtatgcttcagattgaacggatgaaccattttattgatagtatgaggaagatgacgaaattggaagaacgggaattaaactgttccgtggtagatatccggcagttgataaaccagatagaagctctggcagaagtcgtggtggaaaaatcagaaaagaattttacagtgacgacagtgagagaatctgaaatactgactgcggatgaggaaatcatcatggaagtagcggataatctgttggctaacgcattccgctatgccaatcaggaagttaggctgaagctgacagtgacaccccaatatctgaaaatgagtatcagggatgacggaattggatttcaggaaaatatcgacagggtgacacaggcgttttatcatgagaatcgacaggatgacttaaagcattttggaatgggtatgtatatcagccgtatctactgcgaacggcatggtgggaaactgctgataaaaaatgtagcagatggcggtgcggaagttgaggcagtgtttaaaaattatgtattagaagaacaacagcagaaataaatggctgttgtttttttgttgtgatttgtaggctatgctgtttgtagaaaaaagaaaggcgggatgacttatgaaagcaatcataaaaaggaatctgaaaaattatcttaaaaatccgatattctggatcggtttgattgttgttttaatcagtatgtaccagacacttgcaccctatctgtccattcattacgtgaagtcggatgaaaccttcaggaaggtaaaaatggcctccgatggggatgttatggagggatgtattccggcaacaccggataaggagagagaactgtgggagaaagagattgtaaagatacttcaggacacagagaatgggtttggcatgtcggaagtagaggcggaggcagtgatatctgagatgaaacagatgaagattacggaggcgtgtcagtatctgaaaacggaataccactttaatggtgccaattatgtgtatgaggacgtttcatggtatcagggaagcccggaggaagtcaaccggtatatcagagaaaatcttgagaaacatccattctcctattatttcggaagaaaatttacagattttgcaagcctgcatatggcattctttgcaacggttctgctggcgtttttatttttccaggatatgaggaaaaatacttatgaattgctgcacaccaaaccgatgacggcttttcaatatattgccgggaaaataagcagtggatttctcattatgacggcggcactggtcattatgaatatcgtatttatcattttgtgttacgccacggcagtaaaatcaggatttgctatgaacatactggattttgttcagaattcgatcctgtatgtcctgccgaacatcctgatgatctgctgtgtgtatgcggttacagcgctgctgtttaagaatccgcttccagcggttccggcgctggttctttatatcatttattctaatatgctgacatgggatagcaaaggacagtgtcatgcaagaccattctctattatggttcgatttccggggaatttttttgaaacggaattgccacatcaggtatatctcaatcaactgcttcttgtggcagcatccatactgctcatgtttatagcggtgtggatgtggaaaaggaggagagtatattgaagaaagaagtaaaaatatgtatgccatattataaaattgcatattcaatcgcttttgttgtgatattgagtgcaatccagcctgttgtatatgcgaatgaaatcgggcaggcagtagaaagagctgtttcgcttctggcagtcgttttctgtgcagatacttatctggtggaagtgcagagcaaacgctcggaagtattctgcctttataatctaaaaaagcaggcaggggtagtttataaaagactatttgtgcaggtagcttatctgattggaatcagtttgttggcatatggactcttttattggcagaaaccggtgaatctgacagaagaattagatggcggtgccttgtttggaatttattgtattgcgattcccggaactgttttgttttggagtgtgctttccgtaactgtcagcaatctggttcgaaacagatggattggtatgggtgtcgtgctgcttttctggtttttctctatttccggaaaggcaactcagtttttgaaaaactggggaccattttcctacggaacttgtgatttcggtaagctgacagagtggagatggcttggcgggaaggtgctgtgcgtggtatttgcggggatgatgcttgcatttgttcctaagatattaaagaagagagggtaagattatgagtataagaatagacgatttaacagtaacatttaaaaatggagtgacagcggtagatcatgtggatctggaaatcccacatgggatatttggtctgttaggtgaaaatggtgcaggaaaaacaacgttgatgcgggtgcttacaacggtgcttgcacccacaagtggaaaagttctgttagatggtacgctatattgcgaagcaaattacgaaaagatacagaaaaagattgggtatctgccacaggaaattgatctgtatccgtctttgactgttcgagaatgtctggagtatatgggagatctggctggaattgagaaaagagaaagcaagaaaaggattgattactatctggagaagaccagtcttgcagaccatcagaaaaagaaaatgcggcagctttcaggtggaatgaagcgaagagttggattagtgcaggcattactccatgagccggattttttaattgtggatgaaccaacaacagggctcgatccggaggaacgcatccgtatccgtaatttactggtagattttgcagaagaacgcaccgtattattttcaacgcatgtggtggaggatctgatggcaacctgtaatcagcttgcggttatgaaaaaaggtagattcctttatacaggaacaatgagggaattattgaataaggcaagagggcatgtatgggaatgctgtacagaggacgaaagccttgcaagagaattagaaagaaaatatcatatttccagtaagcagtatacggaggaaggaattagattaagactgttaggggagaatatgccgtcagaaagtggatgtatagcttgtgacgtaactttggaagatgcatatatctatgtaaccaatcgataaacattgttaatgaggagtgaaagctaaatgctaagaaaagcaggtgatgttatgggaaagtgatgattcttaccatttctgattccgaagagggaatcctgaataaaattaaatcagttctagcctgcgaaagtacgttagaagttatggagattacaaattctgaaaagttgacattccaaggtttggaaatagaccagcttcagcggagcgtaatcaaagatggtaaggttgtggaacttaccagacatgaatatgacctgcttttttatctggccttatcccccaatcgggtatttacaaaagaacagatttaccagcatatttatgaggatgtggagtcagaagtggataaccgtgtctatgggttagtcaagaatctgagaaagaaaatagaagaaaatccggaagaaccgcactacatagaaacgatacgtggtgtaggctaccgttttcgggcataaaaagagccgtccgattgggcggctcgaagtatttaaacagcagttttcttcactgcctgtttatagttaccggtagcatcgtaatctccagagaggagcagattctggcgaaattgctccagtttgatcttgaagcgtttcccatcctcaacagtcgtaagcatggtaagagcttctagcattccctgaatatatccggttagcaggtaatatctgcagggttcttccgatggtgagatattggacagggtttcttccagatgttcctgacgttccctgagccatgcatcccagacatccagttccaaatcagtcatggtgttcctcctttaaatctgatgataatcgtctttggtgtggaggggagaagtttcatgcacaagcatttttctgctccagatccaaatatggatttgtaaattcaaaaataataagttcatccgcatcgaacatgagctccaactcttttagtgtagctgctggatatccgcaatctctgaatcgttctaatacgtctgtttccgtttcaaatggttcaccgtcttccagcttttctccgattattaagccacatggagtcaataggctttcttcatataagcggacacaatatcggtcagggaaaaataggtgtgcttcatccgtgttataataaattcgttctccaggttctatgctttgcatcacaaagggaacatgatatgcagcggctatcgcctgatatgcttcataaagtggagtccatgctgtctctaaagaaagtagaatatacgtatcattccattccatgtagctgacatttccacgaagagatattccggtggaatctattttcttgtgggaaaataaattgccaatccagcataaatcaggattctggttcagaatgatgtaggtttccaggtcctcccacaagtcatatagtccttccggatttccttctgtataaaagatcacatcatcacagcagatatttgccattacacatccacctccgttccaaaagtttcacccatattctggttggaaaccgtaaggtttacaggggataaggtgccagaggcaagccattgttcgattgcatcaattacctgctccagcgtgtcgttataagccacattgcagtcttccagtcggagaaactgcaggtatgcttcatgaagaaggcttggatcatcacgcagcgtttcatatggaaggttgcagagtccgattctttcctccagacgttccatggagcggcggatgaagtcgcaggaaataaattgttcccggtagatgttataagcagcttcaagctggtcataggtcaaaataaatgagactttctcgcaaggattagatggttgttctttcatggtaaattcctccattcatactatgattggctggtggtacggattctctttgttcgggagtaagatgtaccagtagtttccagcgcaggtcgatttctcggtgaatccaggtatcattttcataaacttcatgtgtcaaaaaattgtaaattgtcggttctttttctatatcatccagatctgcgaccagacaagttgcctgattcacatagggccagagtgcctgttcgaccatatggcgtagttccagtatcagaggatatatctgtcctacatcataggttttggacatgcaggagctgattttcttcagcatcccggaagtttgtatcatctggttgatgacggtacattgttcctccacatctgcatccggattcaggaccagccggtggagcagcacagattttgcataggcagaagcggtcaggttgatgtttctgaccagttcttcatacggctgcttatactgtgtcttcagcacttccagaggcacatgttcccggttcttctttaaggtggagaggagccccgaaaggcagctctccagttcttccattcttgtcaagcacacatcgcctccagctccatcggaacacgggtgtagctgagacggtaaatactgttgcaggtctcaaataccacaccgttttcggatacttccagaatactctgcaccggactggtagcaaaggtctggttataactatagatccacgcccgttctcccagatggaggggcagggacaggattccggtgaggacatattctttcttttgggtggtgtgtaaggttatatttgtattcttcattgatttcacgctcctttccttacttaattttgtttgcaattacggcagcgaccagtttagcgcatcccaattccatctcggataaatgctgtccggttctggaacagagaagaagtgccagcggctctctgtcttcccttaaaatcgggaaaaaagcacaaaccggttgacgggtgttggataccgggtagacagggcagttctcagcagagatcagttcctggccgtccgcaaccaattcggcgagttcttctgtaacgggagtgccttccggaagatagatgcccgcagatacgagtatgtgagcctcactgcaaattgcgataccacagtggatgacactgtagaggacggaaagataggaagccatttcctcttttccgtttaagtgggtagggcatttgcgtaaaagcagctccattcccacattttccagttccagtgcatctccgtctgagagcttcatttgtttccggatttctgcagggatgacgatacgcccctgagagtccatggtccggatgagtgcaatattcataactaaagtctcctttcttaaaaagaggagaagcagtaaagtaccgcttctcttctgaaaatttaggcagcgtaaggcggagcctgtgctgtctgttgcatttgactgttctgctggtctgccagcatccgttttccgttattgatcagtgatgcagcaatcaccgtttcccagttggaaatataggaatccgtccgcttcagaagcgtgaacagatccatgtcggtaagctggatggctgtcgtcttttcggactggaagctgcgtggctgcatgtaggaaccaccgttcttattctgtgctttgatgcctttcccatttacaatctggattttccatgggcttttcataggctgccctttggaatcatagggatgtctggagatataaaacatctgggctgtggaataaccgttctgatcgggattgccgtagatcttgctctggctccattcaaattcctgaaaaccggaagtgatccgggttaagaggaactggatctgttccggtgccaggttgaaacgggtgatgatattccggtctccggtaccgttggaataatcctgaatggtgatgcagattaaagaatgtactttatgcccgttttcctgatattcccctttggcatgtagctgtgcatagttgccgagtggtgcgtagcggagccggtcataaaaggcaatgagtgcccggtcattctggatcttgcagatctggtcggtaatccggttttgataagtttcattcatgagtattcaccttcctttatttgagatgctgtttgacaagctgtgccatattctttggaagctcttccagtttcgtgatatccaggaatccgtccttgtaaatcctgcggatattttccttatcgtcaccaatggcagccgcaaacaggatgacatcccgtttttcgtattctttcttgatgccccgcagatctgcctctgcttccgttccgctgtagccgtaatcggctggctgaccgtcagaaatcaggatcagcagcttctgaagctccgggcgtgtgcacaaatgctctgctacgaagcggagagctgcgccgtcccggttcccgttgcggtcgcacatatccatcagccggtaacagtcctcattgtccacagaatcaaattctgcataggagtaaagagcaacgccgcctgcatccgtggaatgcccgtaaatggtgatagggataccgaggcttttacagaaatcataaaggacaatggcagtctttcttgcatgtgtcatccggtcaccccaacccatcgaaccactctcgtcaatcaggagggcaacagccagacgtttttcctctcctggaagtctggttctggtaaagatggttccgtctgtcttatagagagcatgggagtccagacgttttccaaacaggagattcttctgctttccgccttgctgttcttctttcaaaagcggcaggatggtgctttgcagctttttggaagcccgcaggagcgggggagcaactgtctggtattcattcttcaggtaatcggaaacactggtcaggcgatggatggtaacatggatgcctgcatgggcattgccgtaatgaatatcattggctgttttctgcagttcctcggtcagttccgtctgacagtcttcctgcaccttttctgcagccacatcgttcaagatccggaacagatcctctgcagcatgctcatagccgctgccctgatactgactgacataagtgacgccggggttgttttcatccagaatggtattggtctttgtaagagcgatgcgcccgccttcttccgaaagcacctgtttggcttcctctatagcatcctctttggtacgtggaccggaaggagcattgccctcatcattcccgcttccttttggggaagctggtttgatattctttggaatggcaccgctttttccggtcggaagaggagcgccgctgctgacttcatcccctagaagatcttccagagcatcggcagcggaatcctcgccatgcatttccaattcctcccgtgttttttcgatgagcggctggatatagttccaggtcagggctaagagcgcattggaaaccagcatccggtcagtgcctttttccgattccattgccgtatccagaagatcggtacaatcggaaatggtatccagataatccccctgatagccggtgggattgttgatgtttccggtccggcaataggaaaggatcaggttggcaatgatggaaaatggctggtattctttgtcaatttgttcctgtatggaaggaatctgttcggacatacgcaggttattgagttcaatcccctgtcggaaggtgccgtggaattcctcacacatacggtcttcaatatggatgtcttccagaatgttttgaaaagttgcggcgcatcgtgccagtgtcaggcatccggctttgtccttttcttctaacacttctttgatctcctccagtgctgtctgataagctggaagggatagctccggctccttcggatagaaggaaccgttttccagactcctcagatgaacagcgtgggctgtgaaatcagaatagagtaagtgccccacttcatgcccggtgagccctgtcaggctctgggaacgtaagaaacgggtggggaaagactgggtgatcgggttcgctgcgttgagatgtaccttataattgtcggtatatgcaacgcctgcctgttcggaaatgtcccagtccagcagtacctgcagtccataccggtaacgtccggtaacggctctggcaagggaggtctggtacttctgataggcagcggagaggaataactcctcatccgcaatggaatcctcttttgcccggattagtttctttaaatttctttggctgtgattcacgtgatattcttcctttcttttcttagattttttgtcagcagttcctccatcgtgcagccgtaatacacagcaaggcgaaggacggcataagccatcggggaggagtttgcattttcataattcataatggttttcgggggaagatttaagattctggcaactgccttttgtgataacttcggtgttttggcttgccggagataagacagattatctgccagatgctttcggatctgggcttctgtgagtgctgcttttctcataggcgtgtcctacgcagcaagcacagtatccagacagctttcttccacttccgtacggttctcagcatcggcagaggcagaggcaagcaccgtgtaacgggccgcttcccggatatccccgcagaccatgtaggactgcacccaggaaatcagctccctcatgccacagcagccatctgtaatgagattttcccggcagtagacagccatggatttgacaatgcgtgtcatcagacgtaccgtttttgcatccttgcatccggtaacagccatggcacgttctacctgtgtatcctcatccggttcatccagatcaatcacaaggttcattcgggaaatgacagactggttcatctgtttacagcctgcatagtcattgtttgtggtgattacgatggtcgtatccggatgacggtggatggtttctccgtttggaagatatacgctgttacagcggtctaaaagggagttaagtccaaccagtacaccgggattagcaatgaccgtaggctcctgtatctcaagaatatacccatagcggatggcttcgactagaggcgtatccacatactggaagttctgtccggaggtgtgttccttataatagctgtgcatttcatcaaaaatcgtatcgatcagcttctggtaggtgtcctcggcagaaatttcttcatcatagtttccggtcagcttctgataggcaccggagggatctaactggatttcctgaaaagacgggtactgccgctgaagccgggtgcgttttccgtccacatccggaagaatctgacctaaaaggtcgaatacctctgtatttgcggaacaggtaatgcagcggtaaggaaggtgaagtgcggaagcaatggctttggctccttcggtctttccggtacctgccggtccccgtaaaagaaaattccgcatcggctgtgtggtatccgttgtcagttttgcgtgttcgcagatccgtttgatttccggagggatgatgtaccactctgccaatgtcggaacagatacctcctcttccggagacagccttcgggatgcggtcaggataaatttcccaacaaaatcatctctggaaatggctgcctgtgctttcttaaatccacttcctggacgtaacacctgaaagtctccatggagcacttcggttggtgcatagacccccttctggatatttaacggtttgatcagcgacaatacgccgtttgccggaaggtcaatcttaacaccaccggtcgggagacctgatgcatagcgggttctccggtaaatgttgtcgcagagaacggctgctgtttccgcagcggcgtccagatcgggataaccgttgtcccggtgcgcttttaattcctgatacttttcattacactcttcatctgccagaaaaaccggcatcagtgcgaacagcagagccgcaccggactgtttggagtctttaaattcgtatttttccggtgtgctttccacatccggcggaggagtatagcagcctccgtaaaactttccgtttagctggttgtagacaaccacctgaagatcaccggttttgctcggatattccgccacaacaaaattgttggattgggtaccgaccgccccaagcttttccggcggggtactgccaaccgggttttccagctccagataagcaaggactgcccgcagggtagctgcatgaagcgtggattttttccgtggctgagtacagtatttggatgcaatgtcatcaaagattgcatggtccgtataatcctcaaatggttccgggagtttgcgtttgaacccccaggttgctacgatgttatttgccatgattcgttcctccttcttatgagatccaggacagttccagtgcctgctcggtctcttctgtggtcaattcatcttcagtaaaaatctccgtcaattcgccccagtaatctttgggcgggaaatgttccagctttccccggacttccggttcagtgccgttcagaatatagacatctccctgctcgttgataaacagcttttcatagccccttgcctgtaagtcaccgaccaattccatcagtagcggtttcccaatcagggaataccatgatttgggattaacggctggtctggaatccggatttccttctgacggttcctttttatgtaaggattcaatggtcatcatctgaagcgtcagactgccacgggcatccatgagaatttccgcaaaattataacttccggtattccgtgtgcgaatccgtaatggttccccatccagtatctgggagagcggtggttctttcacaaaatcccatgtggcatccgggaaggcttccttgagctttccggtaatctggaatttgatctgtctccagagaatggtttccagatcaggtgttccttccagatgacgagttctttctgggcgttttcgtagcttatgctccctgtttttcaggcgttccgtgaaaagcgggagaagataactgaacagcgtgactccgataccgatcagggcaatgcctgcaatcagaagccggttggcatcctgtggtacgaaaagtgctgcaagaaacagtacaagcacgacaaactgtaagaatttttttcgatttgattttttcatgagctgattcctttctgattcatgattcttagacaagcccggaagctggatgggaaatcgccgcttccggacatgaaaaagaggaactgcatcatcacaaagatgataaatgcaattcctcaacatagggttccttgagagttaatagggcaactgggatgccatctgttccggcacattttgaaagccgtcagttggctgactgcccggcatacctccgtaatttggcattccggtataactgccctgcggcgggtagctgctctgtggctgaccggttccgtttggcggagcctgatactgtccgccatttgcaggaggcgtgtaggcaccgttagcaggagccattccctgctgtggatagccgccaggcattgcctgattctggtagctgccattgggatttccctgcattgggtagctgccattgccggctgcaccgggcgttgccgcaccaccattcggctggctgttctggtttgcacccggatgtccggtattgctgtcagaacggttggatggtacaaagtgccagtccttgacattgatcctcggaccggcatttgcctgccccgcattctttcctttctgataaatgaacggatgaagctccagatcaccatagatcatcagcccggttcctttctttacgcctgcttttgctaagcgttctgcaaggaacttgttaaaatagcactgatagtaaatggtttcttcctttccatcctggcctcgctgtgaaactgcaatgtccagagaaacatattccgtaccggaattttttccttgctgcatctcaggatctcttgtggccctccctaaaattgttaaaattgctgacataaaaattctcctttctgcctctttgggcgttaaaatagattaaaataaaaaaagtgccattatagcaccgtataaaacggcagtataatgacacgattttccaaacttaaactgcatatgcttctggatgaatggtccagactcccatgacgggacagcacaaaaacttaaatacaagattatattaacacaagatatagcatatgtcaaaagaattagaactatatatagcatatgtagacgaggtggaaggataatatcaaaagaattttggacatagttataaaagtgcaatataatattgtttaaatcggaaaatggaaggatgagaaaaatggagcagaaaaacagaattctgattgtagaagacgatacggatatcaataatcttttatatacggcattacagaaagcagggtatgagacggtacaggctttttccgggacggaagcgaggatgctgttccagatggataaggcgggcttttctttgattctattggatctgatgcttccgggaatttcaggagaagaggtgcttgcccagattcggaaacagggcaatacgccggttattgtcctgacagccaaagacggattggatgaaaaaatcgggcttcttaccagtggggcagatgattacattacaaaaccgtttgagatacaggaggtgcttgcccggattcaggttcagctccgccatatgcagcaggagccggaacataaaagcgtgtcatataaaaacctggaactggaccgtgagcgctttgaagtccggattgccggagtgctgcttcccaaaattacaaagcaggaatttgcaattctggagcttttactggagcatccgaaacaggtcttcagcaaagaagagatttttgaatatgcgtgggatgaacactatatgggagagacaaagacactggatgtacatatcagcaatatccggaaaaagataaaagcagtaacgcaggaggaatatattgataccgtatggggaatcggctaccgtctgcattcttaatctttactctttttttactatttatttgcgtttgattaggatttatccgatatgataacagcagataagaaaaggagatgaaagcattgagtgaattgttattaagtacaaatggattgacgaagcagtatggtcatcataaggcagtggataaagtaaaccttcacataaaaaagggtgctatctatggatttatcggacggaacggtgcgggaaagacgacttgcctgaagatgatcagtggacttgcaagaccgacagccggagagattgagatgttcgggtgtaaaggaaaagaactggagaggattcgttctcgtgtggggtgtctgattgaagcaccggggctgtatggcaacatgaatgcatatacaaacctgaaaataaaatgtgaattgtttggtattcggaaaaagggatacatcgaagatatcttagagacggtcggactggaaggtgtcggaaagaaaaaaacgaaacatttttcccttggaatgaagcagcgtctcggaatcgggctggcactggtcggggagccggatctcctggtccttgatgaaccgatcaatgggcttgatccccagggaattgcagaggtgcgtgataccatacagagactgcgagatgaacggaatatgacgattttgatatccagtcatattttagaggaattatctaagattgcaacggattatggaattatccataatggaagtcttctgcaggagctgacaagcgaagaactgatgaaacgctgcagtgaacggattgaaatagagttaatccatccggagcaggcagtcccgattctggacagaatgggatttaccaactatcaggttacagataagagccatatccatatatttgaacgattgaatgaaagcgccaatgtcaatatggaactggcaaaagcaggaattttggtcaatggaatttccattaccagtgaagaactggaaacctatttcttgaatctgacaggagggaatcaaaatgcttaatatgataaaaatggatctgtaccggatggtccggacaaaaagtatgtatgtggtatggattgtgatggcggcagctatattcttctccacatccatgtcgaaactggatattgatacgatgaacaaggaagcggaacaacagcagacagaaaacattgcagaaacagtgaaaccagaaaccatcaatatgggaatgtccgtattcctgccgacacagccgggagaaaaagtaacggtctttgatcaggtatatgcaaacctgcaggcgaagtttgtggcgttgtttctggtgatttttacagtgctgttttccagtgcagatataggaagcggttatattaaaaatatcggcgggcaggtaaggagccggagaaacctgatcttttccaaagcttccgtgttgtttgtgtatacgactgttaccatgctgctttatttcatcattcagattattgcacagcagatgtacttcggatatctggagtgggggaatggaagcgagttgctgagatactttggtattcagattttgcttcattatgcactggtactaatcagtatggcgattgcggtggttttgaacagcaacgtgttcagcatgacgattgttatctgcctgtgcatgaataccatgattgtcttatacggagtgatcaatcatttgatccagaaggcaggtgtggagaatttccagattttgaaatatacagtgacaggaaagattgcacttttatccatgtcaccgaccaataaggaatgcctgacggcagttgtgattgcggcggcgttcggaatcgtggttacattactgacagcatgggtattcagaaagagagatatctaaatgataaaactagggttcgtgctattgatagcagtgatactggtacaaggaatgttattttggaaataccagcggcaggtgaaagacatctgccgccagttgtcgtttctgatgaagcacgacagcaacatgctgattaccagagaaatggattttggaggcattggtgagttggcagatgttttaaacgaatggctggaactgaagcgaagggaaaagaaggaatacttgaagaaagaggagatgatttcggatacatatacaaatctctcacatgatatccgtactcctttgacatcccttgacggatattttcagttaatggaaacctgtgaagaccaggaagagcagagacggtatatgaagatcatacaggagagaatcggcagcctgaaagaaatgctggaagaattatttacttttacaaaacttaaaaacgattcttttcatctggaaatgtcatcctgctgtatcaacaagattttgaaagataccatattttcctactacgatgaatggacgggcagaggaattgaaccggagatacagattacagataaactgctgtttatgaacggaaatgaacagggaatccagagaatttttcagaatatcataaaaaacggactggatcacggggagaagaaaatcagtatttcactggaagaagttgaaaacaacatccggatacagataaaaaatcaagtatgtcatgtggaaaaaataaatgtagatcaggtgtttgaacggttttataaagcggatgaagcacgcagtaagacttccagcggtctcggcttatcaattgcgaaagagctggtacttcgtatggatgggaaaatcagcgcccggatagaagggaatgagttctgtgtggagattgtgtttccaaaataaaaggaaaaatttatattaaagcaagtgaaaatggggaatgactttatataggtttcatggtagaattacagtagaaagagaagagtcactcagtcatttgttgtatgaaaggatgagtataatgtataaagtagaacttaaatttgatacaagcaagctcgctccggaaacggtaaatcagatgtgtgaacaggcagatcagatttttgagcaggaggatttaagctgtgcagtcaaagcccttggaagcaggatttatcttgaccggggacgcaagcaggactatggaagattctgggcagcaatctttcagttgaaaaactccgtaggaattgcagagaatttgttagagtgtttctggtataacggaacagaaaaggagaacctgattacagactttataaggaactaacagatggacagcttacagaggaaaggcatcaattttgacctgaatacacaagcactaaaggaatattatccgaaaggtgactggcataatgcatatgcggatgtaagggacttttttgaagcaaacggatttgagcatattcagggatcgggatatcattcggtggaagcaatgtcagaagcaaaagccatggcagttatttatcagatgacaaaagaatttccatggctcaattattgtgtgaatgtgtgtaccatatcagatgtaccggaactgtttgatatctcgcatgtatttgccagagaagcggaacggttggaaaagaaaaatgcatgatttgacaaattatttccaatatgttatattcatctcaagcaaaaaagggagtagctgaacgccttgaaagaggtggttttgtaaccgacaaccggtatcgagagatacccgtagcaaatgagatagcaagacttttattgtggcagaggtcatgataggagtctttttttattatgaaatatagaaaatctgccgcaatagtctgctaaaaagaaagagaggataaacgatgagtaacgaaatgatgaaacgggaaatgcaggaagcagtacaggcaggggagcgggcgcttcagagcctttacgcagcaagggataagttgggaagtgcgagaaactggggcatttttgatatgcttggaggaggctttatcagtgactttgtgaagcattctaaaatgaatgacgcagctgcgttgatggaacaggcgaaaagcgatattcagcgttttcagagagaattaagagatgtgcaggtttccttggatctgcgcatggaaatcggcagcttcctttcctttgcggatttctttctggacgggctggtggcagattatatggtgcagagcaagattgcagatgcaagagaacaggtggatgatgccatcaaccggatagaaaagatacttgctgatgtgaaaaatcggatgaatggggaggtgtagcatatgggatgcctgggaaatgtgttgtggtttgtgtttggcggcgcagtcagtgggctgagctggtgtctggcaggttgtctctggtgtattaccgttgtggggattccggtggggatgcagtgttttaaatttgcggcgcttagttttttcccctttggaaaagaggtgcagtatggtggcggagctggttcgttccttttgaatatcatctggctgattgtatccggtctgcctcttgcactggagcatctggcgttgggtacagctttatgtgtgacgattatcggaatcccgtttggtttacagcagtttaaactggcgaaactggcattgatgccgtttggtgcggaggtgtattaagatgcgattatttgataaaaggacaccgcttcagaaggagtgggaaaagctggaagtacaggagcagagattccttcagaagcgttcagagaaaagggagagcattctgaatcagaaactggaggaaaagataccgccgaaacttcagaaaacattggataccgcttttgcgaaggcatttgctctgattttcgagaaaggaaccggggttattgaaaagacgtatcagcggacaaaactggagcaggattatcaggtgcggcagtatatggcggatgtaaagcagaattccaaatccctccgctctttttctaaaaaggcaagagatacgggaacaaagaatttactgctatccggtgtgtctggaatcgggatgggcgtattgggaatcggtctgccggatattccggtatttacagggatgattttaaagaatatttatgagactgctctgcagtatggatacagctatgaaagcagggaagaaaaatattttatcttattattgatccggggagcagtatcctatggggatacactttgtgagattgacgggaaagtaaatgaatttatcagaaacggaatactgccggaagagtatcaggataaggagcagatcgaacaaacggcgggagctttgtcaaaagagcttctgtatatgaagttcttacagggaattccggtggttggtgctgtaggcggagcttatgatgcagtctacatgaaacggatcacagagtatgcagagctgaaataccggcacaggtatctggcggggcggaaaaaggcagagaatggacaattatgtaaaaggtgtaaaagttatagagatatatgatgccgcaaataaggaattgctggtaaagtatgatgataagcataatatagacaaggttatttctgctttaaatataaaatcatggaaagagacagaaaaaagcataggtatgaaccctaaatataccataaaattttattgcgatactacgaaccaagatgaagaaaaagatataaaagaaattaccctttatgaaaatggggaatatgctacgatttttattacttctcctggcggagtaaaacaaaactataaaacgagcattgatatttctgaattggttatctaataatatttgtgtaatgagaatgaaaatctaattctttcaagtttaactaagacattcccggagcaaatgctcatgtacggtaaggaagcaagcaaccgaaaacaagagatagaccgccagcactacactattccgaaccaaagaccaaaagataagcattgtgggaaaatctaaacttttggattttcctacaatgccaactacggcggaatccctcccactccttatatctttctgtatacattgaatttgtatttagtaaaatgcagacaacaccacggatcggcttttggttggacaattccaaccaaacaccacagcagacagcagaaaacattctgaacgctaggaagccggtatgattgttacatataaggggaagaaaaatttcttttaggtacttgctttcctaaaactgatgtgatacaatgatttaatccagaaaaggagtaaaaaatatgcggcaaggtattcttaaataaaactataatcaaatagtgggaacaaaggattatgatagctccttttgtaggggcttagttttttgtacccaatttaagaatacttttgccttatcaattttgacatatccccaaaaacagcaatcacaaacaggtgtatgctgtatatgtgtatgtccgcaacttataatccccagtggtaaaagtattttactgctggggatttttatgccctttggggctgtaaagggaggacaatcacatgaaaataatcaatattggaattcttgcccatgtagacgctggaaagacgaccttgacggagagcctgctatatgccagcggagccatttcagaaccggggagcgtcgaaaaagggacaacgaggacggacaccatgtttttggagcggcagcgtgggattaccattcaagcggcagtcacttccttccagtggcacagatgtaaagttaacattgtggatacgcccggccacatggattttttggcggaggtgtaccgctctttggctgttttagatggggccatcttggtgatctccgctaaagatggcgtgcaggcccagacccgtattctgttccatgccctgcggaaaatgaacattcccaccgttatctttatcaacaagatcgaccaggctggcgttgatttgcagagcgtggttcagtctgttcgggataagctctccgccgatattatcatcaagcagacggtgtcgctgtccccggaaatagtcctggaggaaaataccgacatagaagcatgggatgcggtcatcgaaaataacgatgaattattggaaaagtatatcgcaggagaaccaatcagccgggaaaaacttgcgcgggaggaacagcagcgggttcaagacgcctccctgttcccagtctatcatggcagcgccaaaaatggccttggcattcaaccgttgatggatgcggtgacagggctgttccaaccgattggggaacaggggggcgccgccctatgcggcagcgttttcaaggttgagtacaccgattgcggccagcggcgtgtctatctacggttatacagcggaacgctgcgcctgcgggatacggtggccctggccgggagagaaaagctgaaaatcacagagatgcgtattccatccaaaggggaaattgttcggacagacaccgcttatcagggtgaaattgttatccttcccagcgacagcgtgaggttaaacgatgtattaggggaccaaacccggctccctcgtaaaaggtggcgcgaggaccccctccccatgctgcggacgacgattgcgccgaaaacggcagcgcaaagagaacggctgctggacgctcttacgcaacttgcggatactgacccgcttttgcgttgcgaagtggattccatcacccatgagatcattctttcttttttgggccgggtgcagttggaggttgtttccgctttgctgtcggaaaaatacaagcttgaaacagtggtaaaggaaccctccgtcatttatatggagcggccgctcaaagcagccagccacaccatccatatcgaggtgccgcccaacccgttttgggcatccataggactgtctgttacaccactctcgcttggctccggtgtacaatacgagagccgggtttcgctgggatacttgaaccagagttttcaaaacgctgtcagggatggtatccgttacgggctggagcagggcttgttcggctggaacgtaacggactgtaagatttgctttgaatacgggctttattacagtccggtcagcacgccggcggacttccgctcattggccccgattgtattggaacaggcattgaaggaatcggggacgcagctgctggaaccttatctctccttcatcctctatgcgccccaggaatacctttccagggcttatcatgatgcaccgaaatactgtgccaccatcgaaacggcccaggtaaaaaaggatgaagttgtctttactggcgagattcccgcccgctgtatacaggcataccgtactgatctggccttttacaccaacgggcggagcgtatgccttacagagctgaaaggatatcaggccgctgtcggtcagccggtcatccagccccgccgtccaaacagccgcctggacaaggtgcgccatatgtttcagaaggtaatgtaaagatacataatcgtcaagacggcaacaatcagaagttatggagggtaacaatggaatatagtaaggaagatttaatggaagcaaaaaagcaaatttggggagtgggagagaacatgggaacagaggaaagtaaaaaaatctgggaggagaacgcacaattttgggataatgcaatgggtgacgaatctaatgaatttcacagagaggtagtgcgtcccaaagtaacggaacttctatctcctaatcctgcggattacattttggatattgcgtgtggcaatggaaattattcttcgtatcttgcacaaagaggcgcttcggttgtcgcttttgattacagcaaaaaaatgatagaattggctaaaagacggcaatcacaatatgcaaaacaaattgaattttgtgtggcggatgcgaccgatagaaaaagtatattagaattaaaaagaaatcgagcctttacgaaagcagtttctaatatggcaattatggatattacggatattgaaccacttcttatggctgtttatgaactgttgcaggaaagcggaatttttgtctttgcaacgcaacacccttgttttgtcacgttgactgaaaaatatatgacaccgcacagttactatgatatagcgattgaagggcaaccgaaagagcagatttattatcatcgttccatacaagatatttttaacctttgttttagagctggatttgtcattgatggattttatgaagaatgttttaaaaccaacaaagaaattcctatggtaatgatagtaaggcttaagaaggtaaaacgtgatagcttaaaataaattcaagtttgtcgggtaaatagcaaacccagccgagccagtcaacggtcaagatgaacggcgcatatgcgcagccgttgacagccccgcccgcctttgctggtaggcaatcaaggggcgacagcaagaagtgccaccgccccgcactattattcagaaaggggaatttccatgaccgactagatagcctatcaagaatatatccagcgcaggtacaacgccttttgcaagactgttatccgctgtgccgccttggacaagattttgaagcttaaacggcaatgggaacggcaagtttcccttgactatctgatgaacgagaagtttgtccagtttgccgcgtcggagccggacgaggaatacccatttaccgtctgcggtcagaccgtcctgctctgcaacgccgcccttgccgacgcgatctctgttttgccggagcagacgcgggaagaaatcctgcgctattactttctgcgccagccgcagcgcgtgatcggcgcgtgtattggccggtcacgcagcacagcggggcggcatatccagcttgccttgcagcggctacgcgaagaaatgggggtgagccggtatgagtagacttctcccctatgaaacaatcctcaaagcccgtgagggcgacccagaagccgtgaacgctgtcctgctccactacgccggatatatccgctatttctcaaaagtgaacgggcaggtcaacgccgaggtggaggactatgtaaagcagcggttaattgactgtcaattcaagttccggcttgacgaaccaccggacaagtcataaaaactgaataccagccgccaccgacgcggccagcgaaagcagtaagtcttgaaaaagatttactgctttttttgttgtccggctccgctcccggccattttgccccctgccggttgtagtagtaagcgaggagggaatttttctgccctggtgtttggcatttggagcatttacccgtagtagagggcaaagagaaaggatttctccaacaccgggtagaaaccactgcgtccggtgtcattttagcgaaagcgggcaggaatgccctttacaggattagtagtagcagaaaaagagaaacaaacttttgtggttgcagttttccaaaaaagtggcggacggaagtgagagaaagtttgcagtcacggagagcaagtttctaccacggtgccaaaatccgcaattctgcagttttgcccctcgcgggaaacttgttggggagtgccttccccaaaccctgctcatgcgcccttacgggcgagaaaggaggtcacaccatgcgaaagaaatacaacacgccccaccgcagccgcgttgtgaaaacccggctgtccgaagatgagtatgccgacttcacagcgcggcttgcgccctatggtatcagccagtccgaatttctccggcaggcgatacggcgggcgaccatacgcccggttgtccatgtgtcgtcggtcaatgacgagttgctttccgctgtcgggaagctgacagccgagtacggcaggatcggcggcaacctcaatcagattgcccggtatctgaacgaatacggcgtaccctacaacaccctttccggcgaggtacgcgccgccatatccgaccttgccgtcctcaagtatgaagtcctcaagaaagtaggtgacgcggttggcaacactcaagcatatcaactctaaaaacgccgactacggagccgccgagcaatatcttctctttgagcatgacgagtttaccatgaagcccgtccttgatgaaaccggcaggcttatcccccgcgaggactaccggctgtccacgctgaactgcgacggggaggattttgccgttgcgtgtatgcgggccaatctccgctatcagaaaaaccagcggcgggaagatgtgaaaagccaccactacatcatcagctttgacccgcgggacgggccggacaacggcctgaccgtagaccgggcgcaggcgttgggggaacaattctgtaaagagcattttcccggccaccaggcccttgtctgcacccacccggacgggcataaccacagcggcaacattcatgtgcatatcgtcataaacagcctgcggattgaggaagtgccgttcctgccctacatggacaggccggccgatacgaaagtcggctgcaagcaccgatgtaccgacgctgccctgcgctacttcaaatccgaagtcatggagatgtgccaccgggaggggctttatcaaatcgacctcttgaacggcagcaagaaccgcgtcaccgaccgggagtattgggcgcagaaaaagggacaggccgcgctggacaagcagaacgcccccatgattgccgatagtatcacgccccggcagaccaagtttgaaacgaacaaggagaagctgcggcagaccctacggaaagcccttgccaccgccgccagctttgacgagttttcctctctgttgctgcaggagggtgtgaccgtcaaggagagccgggggcggctttcctacctcacgccggacaggacaaagccaattaccgcccggaagctgggcgacgattttgaccgcgccgctgtctttgccgttttagagcaaaacgccgccagagcagccgaagcgccagccagatcccccgatcccccacgcaccataaaagaccgcttgcaggttgccagagccgagatagccgccccgaaacaggacggagtgcagcggcttgtggacattgagcagaaaatggccgagggcaaaggccggggctatgaacgctgggcgaagatacacaatctgaagcaggccgccaaaacgctgtccgtctaccagcaatacggctttacttccccggagcagttagaagccgccgttgacaccgcctatcagaaaatgcgccagaccagcggcgaactgaaagcactggaaacgaagctgcaagggaaaaagaagttgcagcggcaggtgttggcctacgcccagaccaaggccgcccgcgacgggctgcgggcacagaaatccgagaaagcccgcgccgcataccggcaggcccatgagagcgattttatcatagccgacgcagcagcccggtatttcaaggcgcatggcattaccaagctgcccgcccggaaagcgttgcaggccgagatcgagcagcttatctccgagaaagacggcctgtataacacctatcacgaacagaaacagcggttcaaggagttgcagaccgtcaagcggaacatcgaccagattttgcgccgggacgagccgcaccgcagaaaggagcagagccatgagcgataacctgccccacatggactaccgccagcaccggcgggcgcggcggctggtacatgagtgctgtaactacgatgaggggaactgcctgctattggacgacggggagccttgcgtgtgcgtccagagcatttccttttccctcatgtgccactggttccgtgtggctgtcctgccccttgacggggagctggccgcagccctcttgtgccggggaagccggaaacggtgtgccgtctgcggggcggcctttgtccccaaatccaaccggggaaaatactgccccgactgcgccgggcgcatgaagaaaatcaaagccgccgagagaaagcggaaacaaaggcagagatgtcacgctttagagcctttcaaacccgcataaatcaaggcttttttcgtgggtgtcaaagggtacgcgatacatttatccttttcccccggaaacggcgttttaatgcgtgacaatacgccaaaatcaacccgaacacagggaggtgatcctatcgctgattatatcagggcagacacgcggctgcccgcctatctgccgtatccccgtttcctgctgaaaatggagatttcacagaccgccaagctgctgtattcgctgctgttagaccgttccaccctctcccagaaaaacaagtggctggacgacgagggcaggatttatattatctatcccatcgcggagatagcagaaatactggataaaggcagcaccaccatcaagggggcgcttaatgaactggacacggcggggctgttggaacgggaacggggcggcttctccgcaccgaaccggctttatgtcaaagtaccgccagtgccacaggtacagttttcagaccaactgatggccggaagtccgcccctcatagagccggaaaaccgtcctactgatggtcagaaaaccgaccttatgatggtcggaaaaccgtcccctaaccaaactactataaacaaccttacagagagccaaacaaagggagtgagtggggggccgtccgcgccctatggccgatatggaaatatttttctgtcacagaccgaatacgacgagttgcaggcagagtaccctgacaggctggaacggttcatcgaggaaatgagccgctaccttgccgccaacgggaaaagctaccagaactatgccgccgccctgcggatatgggcggggaacgacaaaaaggaagcccctaaaaagggcataccagactactcatgcaaggagggcgagagtttatgaagaatgaaatcaacgcggttttggagaatatgacgaccaccatcccggagccggaggactacaccggcgaggacggtttactgtactgcggcaagtgccgcaagccgaaagaagcctattttgcgccggataaggccgctatcttcgggcgcgaccgccacccggcagagtgcgactgccagagaaccgcccgcgaggaacgggaagccgccgaaaagcggcgcagacaccttgacaccgtggaagaactgaaacgccggggctttaccgaccccaccatgcgggactggactttcgagaacgacaacggcaggaacccgcagaccgggcttgcccgccggtatgtggagcattgggaagatatgcggacagacaatatcggctgcctgttctggggcggcgtaggcaccggcaaaagctaccttgcaggctgtatcgcaaacgccctcatggagaaagaaatccccgtccgcatgacgaactttgctcttatcctcaatgaccttgccgccagctttgaggggcgcaacgagtacatttcccgcctttgtcgttatccgctgctgatccttgacgacttcggcatggaacgcgggacggaatacgggctggaacaggtgttcaatgtgattgacagccgttaccgcagcggcaagccgctgatcgtcacgaccaaccttacgctggacgacctgcacaacccggaggacaccgcccattcccggatttatgaccgcctgctttccatgtgcgtcccggtacgctttaccggcgacaacttccggcaggaaaccgccaagcggaaaatggagagcatgaagaaactgattaccgactgaaaggagtattgcctatggcagataacaagcagcacgacacccgcaccacccgccgccctgactgtgtgacggaaatccgcatgggcaattccgtccttgtcgtgtccggctatttcaagaaagacaccacaaccacagccgccgacaaaatggcgcgggtactggaagcggaagccgctgctacacaggagccgacttatccggcgtgaaccggggcatggaaaagcggccatgccagggagcatgaccgctggaacgaaaatcggaagtgctttagcaattcttaatctcattctctataaaataatttgcaatttcaaaggcttttattcttctctttgccaatgtgatttgtgatttataacgctcggaattatcctttgattcaaatgtttttactgtttctcttagcttgtgcagagttgaatcaatttgccttttggccgcggttaattcatctattgtatacttcatgttttctcctttaacttctgatttttttgttaaatcagagtataccacggagttatgaacttttctactgcaaatatgggacgacaacccataccataaaaatcggaaaattgaaaagctgtaaagaagcaaatttaacgcttttgccgctgtacagcccccgccgttccgtggtacaatgaaaccacggaatagtggggctggctgtcggaaacggaggattttatgttaagacaagccacccaaaacctcattaccgccctttatccgagattgtcccacgaggatgaattgcaaggcgagagtaattccatatcgaaccaaaaaaggatactcgaaacctacgcaaaacagaacggctttaccaatctgcgctggtacaccgacgacggtttttccggcgcgaactttgctggggttagatagcgatactttttacatctaccatgttgcggcggtcatggttgacaacttgcgtcggctcctgctcggtatcaacctgtccgacaaagctataatggatttcgattttccgggtgttggtttcccggtctaattcatgtatcaaaatacggtcgataaactcatggacgttttcataggtcaattcctgtatgtcgctgtatttcccgacaatctgaataaaccttgatatatccctttttcgctcggtaacggttgcgatctgctgttgtaactcgtctatccttgcggcaagggatttcttttcgtcctcatagccggaagttagaaacacaaaccgttcatctgtcagtctgcctaatgcgttgtcctcatacagcttgcggaaaagcgtgtcaagttcggtcatacgcgcctgtgctttgaaaagttccttttgctgctgcgctaatgcctttctcgcttccatgtcgccgtactcggtagagttcacctccttcccgcgtggagtagaggacgggagttaagggcttgtcctctctgcccctttcgctccgtacccgttcgggagatggctcttgagtgcgcttttcagaaaaaagttgaaaaaagcaaaatgcgcccgtccgcaagacgcggacgggcgcaaaggaaatgtaagcagtagctaaatgtattgacagttcacattcatagccggaatatcccgcttgcggagcatagctttttttgaccgcaaagcattaggcgggttacagtaaataaaaatggacacggcgatacctccccgataccgccgtatccttaaaaaagggcgactttaatacactacccgcaatccattctataatagggaacagcggcttttgcgcaatattaaataaaaaagccgataacacataggttttttgacctaatgcgttatcggctctgcgtctatgcgtctggcacttttaatcatttttttttgaatttattatatgtgttagctaactgtccacaagccgcgttaatctctctgccatgagaaactctcatagtaacttcaagtcctgcttgctctaattgatgtttgaatgcaactatttcccgtttctgtggtgctttaattcttgaattgcttgttgggttgtattgtaacacgttaatcataacttttttgccccgaaaccattttgcaagttgtcttacatctgagggccggtcatttatacccggtaaaagcaaatacgcaaagacaattttgcgattatgcctttcagaataggataaggcttgcttaacaacatcttcaatagcatatatgcgcatgtgaggaataatacgatttcttgcagattgtgttgctgcgtgtaaagatattgtcaactgaattttaagatgttcctcgcgcaatttttttaattgatcgaccggaccaactgttgatatggtaatgccgtcggttggaaagttgagcccatatctatctcggagaatatggattgcttttatcaagttgtcataattgaataaaggctctcccatacccataaaaacgatacggtttacttttcgacgcaacaatataatctgttgtacgatttctgacgatgttagattacgaacaaagccatttcgcccggactcacaaaaaatacaaccaacaggacaaccgacttgtgtgctcacgcaaacagttccaccatctcgccgcttgataaaaaccgtttcaatgtatttgttgtctttcagttcgtaaacatacttttcagtatcactgcttttgcaaatattttttaccaacattgatagattttttttgcgtggtaattgcttatataattcttcatataaggcttttgcttcattctcgccaataacttccgacatttctttgtaagtaaatccgtatggatcattccgtacttccgcaggcgtatatttaggtaaacgtttcatttttatatcctttcttctaaataataaaagtttgtttttctgtatttttgattacaatctctaatttttctacatcaatgatatgcgtcaatttgcatttagggcagaaaagaggaaaatcttttaatacagtattatgaaatacttgaactctcgtctttccgttacaaatcggacattttatccaatattttttaagcattatatttcactcgtcctttttacacaaaaaaatgcaggtcaatcctcaacatgagcattgacctgcatttataatgcacagagcagtacaacaaaactaaggcatagcttgcactatgtctatactatatctatacgtcgttagttttttgtatagcatccgcaaaataagcatgacaaaaaagcccatgttgaaaatgggaaaatcctttttttcaatgcttatctaatacgcatgctatgcaacataaacgccgcctccttttacataaattttattttatcagaaaatcagtctactgtcaatacacaacaggaagtatttaacctaatgatatgaattgtgtggacatatccaaaaagaaaggtgaactgtaaaatgtaacagggtgaatgaaaatggcaaaaagacccgtaccattgtacgactttaaggctttcggggcagctataaaagccgcgagaaatgaatacggcgagagccgcaaaaaggtaagcgacgagttatatatttccccgcgctaccttgcgaatatcgagaacaagggacaacagccgagtttacaggtattctatgaccttgtaacccggtatcatatttcggtagatcaatttttcttcccgaacagcaatgcggagaaatccaccgggcggcggcagcttgacgcgctgctggacggtatgagcgataaaggcatacggattgtaaccgcaacagcaagggagataacggaagtcgaaaaagcagaggattaacctcacaatatgagaaatcgggagattgcagcgcatggcggctgcaatctttttttgcgtccaaaatcaaaggaacgcgcaacaaataccgcttttcggtgggggtatggagtagatagcaagcacagcaaacgagtacccgtttgcggaaaatgcttgttgggataatcccaaacccttataccgaaaggcggtgcggaaatggaaaaccgaaagagaaatatacagatgaagttttacgttacggaagaagaaaagcggctgatcgacgagaagatgaagcagcttcccataaagcagtatggggcatacttccgtaaaatggcgatagacgggtatattcttgtcgttgaccgaagcgacacaaaagcatatatccgggaactgcaagcggtgagccggaacatcaaccaaattgcaaaacgcgccaatgcgacggggacggtttacaggcaggatatagaggacattaaaaaggcggtggacgagatatggcggttacaaagacgcaccctattaaatcaaccttaaaggctgcgatagactatatcttaaatcccgaaaagacagacgggaagctgcttgcgtcctctttcggctgcgggctggaaaccgccgatattgagtttgcatggacgcgggaagctgccggagatcgcggcacacatttagggcggcacttgatacaatcctttgcggtgggagaaaccacaccggaagaagcgcacaaaatcggcatggaacttgccggggcggtattaggcggcaagtatgagtttgttttgacaactcacgtcgataaagaccatctgcataatcacttgattttcaacgcggttagcttcgttgactacaaaaagtaccattccaacaagcaaagctatcactttatccggcgcaccagcgacaggatatgtaaagagcatgggctatccgtcgtcgtaccgggacaggacaagggaaaaagctatgcagaatacaccgccgaaaagcaagggacaagctacaaagcaaagctgaaaacggcgatagatactctcattccccaagtgaaagattttgacgaactgctgcgccgcttgcaggaaatggggtatgaaatcaaacagggcaaatacatttccttttgcgctgccggacaggaacggtttacccgcacaaagacgctcggcgcggcctatacggaagaagcgataaaggagcgtatcaagggcgtgtatgttgccaaaacaaaaacgctgcgggaagataagaaaatccggcttgtcgtcgatcttgaaaacagtatcaaagcccaacagtcggcgggctatgaacggtgggcaaaaatccataatctgaaacaggctgctaaaagcatgaacttcctaaccgaaaacaagattgagtattatagcgaacttgaaagcaagatagccgatattatgaccgctcatgacgcggcggcaaaggcggttaaggaagtggaacagcgtatgtctgatttgtcgctgcttatcaagcacaccaccacataccgacagttaaaaccgatttacgatgaataccgaaaatcgccggacaaggaaaagtatctgcgggggcatgaaagcgaaattatcctgtttgaagctgcggcaagggcattaaaggaaatgcagataaagaagctgcccgatctcgccgcgctgcgcaaggagtatagaagcttaaagtcggcggggtggtcgatattaaacctttcccaaatgtcgcccagcgtcatatcctttgtaagtgtcggataggaacggcaaaattttttgcacttctattgcttctttatcacacataagcaaatgctcatggcattgaagcggatacaaacactattgtttgatagaaataagagaggttatttataataaaatgagccgccagaactgtaggggtgatgcagtacgggcggctcattttctatctaaacggatgtatccggaagttccggcagttgatcggtgagttcttcatatccgagaatatctccggcacatggcatcgattgccctgttccctgctgtggtttccggaagtacagccgataccgatgtccctctaggagtttgatattcttttccagtgagaaggcgtattcctttccgttatcactggcaaaccaatattgctggtttttcccgaagagtgtctgttcccgtttcgtgcagcttacgtccagtgacagataagcatgtgtatggatcaggtggtagaaactgagtgcacgcaagatgctgcagattccgatgaggaggctcatgaggataaagagccggtcatgggtggcgatcccgaagatgcacccaaaaagtacacagaaaaagccgattgcactgatggcaaccagctttgtgaaaaatggttttggcataaggttccttcctttaacatgtatgaaatgtgatttgtttattcaggtacaaattagcaatagcctgcagcactggatactgggtatggtgaatctggacatcatccacaagtgtttggtaagttgtctccggttctgtgtataactcatccataatatccgattcgttgtggattactttttcctgctccatacttgtgacaagctcagcggtcgtgagggataccttatcagccagcttcagaatggtatcttccatcggtgaagagggtttcttctttaaatatctgccaaactcttttgcaccaatagttccttccagataaagctgaacgcagccaaagagccggatgggaaaggtatccttcaagggaataatggtcagactgccgagaaggcgatataaggcatccacccctgtcagtccaattccgcttacaaccagaccgcgtaaggaaagtcggttcagatagtgttggaaggataagcctttcggaccttctttctgtatctggcgcagggtataggcatcctggagttcatggagcgtcagaatctggaaggcaagacagctccagagcagcagctcgtcatccgatagtccatattcttgtccatcgttgattacaagaggaatggattttccgcctgtcgttttttgaaattttaaggttccgacagcagtataaagtgtcagcataaaagttccctccttcaaggttaagtcagaagtgcatagagtgcatcatcctgctgtaatagtttccgtgctttgctctgccatgcccgtacacgattggctggtacttggtagtgttttgccaagtcaaagctggtatatccctgctgttgcagatagagggctacaattcccttctgaatagttgaggactgtccggtgccaagctgggttaaatgctcaagaagcaaggtctggtttgtgtccttttccgggtgagttgtttgtgtatcctcgtaggaaaacaaatcacgataatggagatgttcatcttcagatgatgcttcgtccagagaacagagcatggagcggtcacgggcaattttccgccagtagtcaaagatggcatgacggatgatagttttggcataaggctggaatgatcttccttcctcaaatccgacagccgaccggcacaaagccagatatccaatctgacataattcctgttgttcttcctcagttacataggcagcggtgcgggtcatggaacgaatcatgatcggaaccagatccatggatttttccaccagttgtttttgctttttatttagtggtaaggtcatcatcaatcaccgcctttcagctggctgcccggaggcggaagggaatatggttgttctttaaaacatctgcggattcccgaatgagctggtcgcacatatagttgctgaactgtccgatgtgagcctgcttatctgtcagacagaacttatctgccacccagcgatatgcttccggtttggaaaggatgccctgttgccagatctgatcgaaaattcgatgtgcctgaatccgcttttgacgaagctcccggttggcgagcgttccttttggtatcttggttcccggatgtaccccgacataggaattgcaggatggatagtgggagcagacataaacctgtccgccatgagaatgcgttccatatacaaaggatgcatctcttaatattgctgttccgccgcagtaagggcagcggatgatttttggtttcttcatctgttttcacctcgcttgtacatacacgatacgtaacgtgtacgtgaataaccagtacgtactgtatacttatattgtaagtaagcaggtgatgaattcccataggacgcaagcggatactgatcccagattcggactaaatggcacgaatccccatttttcagatgccgggatagaaaattgctcggatgagcgggaataagccgctgtctgtgaaacgtggataattaaccggtgtaaagatgaacttctcacagaaaatccgtagcaggaataagctgatcagtaccagacagagcaggtaagtgttcctgcgccttctggtccatggctttttcggacggaatttcacatacaggacaaaaatcatgggaataaatatcaggttcgtaaagacctgatcgatacattggatgattgaaattacgtttaacataggcagtgcctcctttctttacatatcctgtacgtataagagcctgaaagtgcaactttttgttaccagtcatattgctggttctcctgaagccggagcagtgccggaatgggacatggctttaaaggcagcttctgagcggccagatagggcagataaagctctgtaaaagcagcaatgctcatgcttccggtacattcggttggctccggtatccggggaaacaaaagcgctgcatctgaaagagggaggatgcaggggcttcccgtttcatccggatggaataaaaagccagagttctcacagctttcctgtgcgttacaagtgcggcaccagacgtagatacaggagtgccagttcccttcacagaggttcagaaaatgacggatgtgcttggcatctgtcttgcagtgggggtgtttcatattcatcacctactaaagaagcaggcagttccatgtgggagctgcctgcaggagtcttcgttatgagttactgatgtttctttttgcgtttgaagtaaacgatgcccaggacacttgcacctgcaagtgcagctatggcgattccggcatacaggagaagcggcgtctcatcgccggtctttacaggcggagctaccggaggcgtctccggttctttcgaaagctccgtcatgtgtacggtctgaccttcatccttcagatcctcatgggaagcaatctcatgctcggtttttccgtctgtatagtagagcttttcaaagacaaccacatcctgtccggcaagagcagaagcgtcgaaggtaaaggtaacttccacagagccgccagctttttctgctttaaattctgcctgagcggtaactggttttccgtcttttaacaaagcctctccggtttccttattcatcagggttccgatgactttgtactcagatccaggcatcagaccatgataagtgaccgtatctacgatagtcgcttccttggaagcagagacatcctgatccccgtcactgccgtctttggctgtggttttgatttccgggaagtagatggtctggttggcatctttgatgtccgcatgtaccgctacttcgtgatcttcaaaagtcattgtttcaaatgccacgagcgtttttccggaaagtgcagaggcatcaaaggtaaaggaaagctctacgctgccgttagcttcttccggagtgaaacttgtttctgcagtcacagctttgccatccacatcgaaaggtttttcggtttccgcatccatgagtgttcctgtcagcttgtactctttgcctgggatcaggtttttgtattccacaaggtctgtaagcgtcagttctttttccggttttgcatagtgtgtgccggaagcagcatctgttgcagtggttttgatttccgggaagtaaatagtctgtccttcatccgcaatgtctgtgtgtacggcaacttccttgtctttgtaagccagggattcaaagacaactactgttttcccttttaaggagctggcatcaaaggtaaaggtaacatctaccgtaccagcggattcttttggcttgaaggatgcttttgctgtcaccggttttccgtctgcttcgactggtttctttgtttctttatctatcagagttccagtcacttcatatttctggttaggaaccagccccttaaaggaaaccgtatccaccagcgtgatttcttcctttgcacaggaaatattggagttcgtgtccgcatctttcgcagtagtcttgatttccgggaaatagatggtctggtcttcatcgttgatgtcggtatggactgcaagctgcatctcatcctgatataattcctcgaagacaacggttgtttttccctttaaggaagttgcatcaaaggtaaaggttactttgacggagccggaggatttctttgcagtaaattcagtttcagaaatcaccggtttttcatccacaaggattggttccccggtttttttatccattaaggttccagtcagtttgtatttctggccctttttcagtccttcgtattccacaacgtcttcaatggtcacttcttttgccggctggctcatgtgtgtaccggtctcggcatccagagcagtcgtgccgatctcaatggcatcatcggtcagagttccaacctgtatcagaacagaatccttataaaccttgacttcaaaggttaaaagatccatgcctttgttggaatcacaacgctgttccgccagagtgtaagtatcgtaaatgagagcgcctttggaatcatccggtttggaggtgccgaaccagatgccgtcttccgaagactcaccccggttggtatttgcggtatgtttgttccatttggaggaagtgctggcataaccgttggcatctgtcacaatcacatggctttcgcctgttgttttggaagtgatcttaaatggcacatttgccagacggttctggctgccgtcagcaatcttgacaaattccagatccccgcggatgacctgattggagatggaattgtcttttgcagtcagttccacgatttttccctgttctgtgatgtcaaattctacagagatctttccgctgttcagataaccggaaggtgcagttgtttcatccacacggtaatgtccgaatgggagagcatcttttgcagttgcagcagaaccggatttatcggcagtaagtgtaaggacaacctgatctttcgtgtaggatgttccgtctactaataccggattttcatttaacgtagtgatcgcaaagacagtaccttccaaagtggcagaaccctgcggttttgcttctccggtctcgctgtcacgtttctggatcttcactccgccacggatgacagattcttctatggtagaagactggtataccgaaaccatttcctgcttaccgtcacctgtaattttctgtacgaagacagttggattgagctggtatccggcaggggctttgctttcctgtaccgttatggtaccgagcggaagacagacggtcttgccatcactggtatagtaaaaggcatcgccgcttacaaaggaatctttggtaaaatgcatctttccggaaacatctgtttttaatacccaggtacgtgccggtttctttccagcttccgcaggatcactgtcagactgctcggtatagaacttgactgtaaattctgcgtttgcaagggaagctgctccctgtggggaggctttctttgtttcggcatccagcttttcaagcaccagattcatgggattattctgcggaatatctgttacgtttgcagcagaagtctgttctgcttttacggtgactttgtgagctttggtgtctacaatgtagcctttggaagcagagagctcttttatggtataatcgccttcctccagttcgccggatctggcatacccgttttcatcagtggtcagtttctggatgagcttctcaccctgatagatcccatacacagcaccctttaagctgtaattcggattcccgtccgatacgcttccgttggcagaagattttttcagttcgatccagccgtttggaacctgataccagcttccggcaatggtctggctgccctgtcccggaacgatgaatgcccggaagccttccggcgggttcggaagtccctgaatggcactggctacttccagtgctttatcaatataggactgcggggcgccatggaaagctccggtgtcagcggaattaccggcatagatgtaagcgacaaccagatgtccgatgacatagctgttatcatcactccagccactgaaatatttatccttgacgactttatcgtagccgtaaccgccgtttaagtagtagagcgcttttctgagcggggagttctggcttaaaaggtcataggaataggaaccagaggaaggtgttttcttcagtggttccacgcagtaggcagtattgctcccgtcaaagctcatgcgggaggtaaaatagctgccgtaagggatattggcacctgccttatagctgatggtgccgtcggctgcatgaaccggaaaactgccggaaaacaatgcgccgactgcgacaaggactgccagcagcatagccagcgtccgtctggtataggatttgtatgtctgtaacataagtctcctccttcttgaagttcaaatgaaaagggcagcgtcagtgctgccaaaagttacacagcctgtttcttctgtttcgcaaggatttccagaagctcctgccgatctgtggtaatcagctccttttccagattggaagccttaaattccacagtgatgttattgttgttggttgagatcagaccgttgccccgctggaaatgggtgatgttcattacttctgtttccgatagatgcaggatagtcttcacccgctgtgcctcttcatcctccatgttcaggataatcttggtcttgcagttattgatgatacccttgccgtacttcccgtcatccagagcaaagaagtcgtttaaatcctgtgtggcaaagatgccggctccggagtaagcacggatgatcttggcaatctccagtacgaattccgctgcaagccggttgctggatgcaccgatgagctgccagacctcatcgacaaagatggctttctcttcggtacggttttccttcgctttatcccagacataatccagggcaacgaacatgccgaccgttaaaagatcgctggaaccggtcagttcggagatatccagtaccgtatatttattggtcaggtccacattggtctgctggttaaaggaagaagcagaaccgtgaaccaggcggttcaggatatgagccagacgtttggtatcctcgctttccagcaggacattgtagacatcctccagaatgggcatctttttgtactgctccggatgctgcggatctgtcagggattcatttttatgtgtaatcccttttctggcataggttttgattagggcttcatccagaagctgcttctcctcatgggacatatccgggatcagcagactgaagaagatgtgaagcctttggatcttgcctgccagtgcggaggcatccagtgtcggtccgtccagcagttcatttacagaattgtctaccttccggatttccatgatgttgatacagttcttactggcaggagagatctggataaattctccgccgacattccttgcagcccggtaaaattcgtgtccctttagcggagcgatgatgaacacctggatgccttttcttcgcatccttagtgccatggtctgcatggtgaaggtctttcctgctcccgaacagcctaagatacagatgttgctgttcttgtactgcctggaatcaaagatatccgcaatgaccagggaattgttatgcttgtttaccccaaagaggattccgttatcatcgcagatactgtagctgacgaagggatagcagcttgccgccccggaagtcagtacgttccgcttggacagcttaaaaagcttcttgtccagatttgccagcggcagagaggataaaaatccctgctcctgtaaaaagtagcaggagtgtaagttcatatcctgcgagatcaggagctttttcatttcctgaatccgccactgcagttcttccaacgtggaagcagtaatggtgatgagaagattcatgtaatagaaatcttcgttgttggcaagtccctgcttcagaaaatatccggagcggatggcagaatccagatcgtcataatcagtgttggtatcggacgcatcctttaatttggaacggttgatacggatctgctgaccgagacgctgctgaatcttgtcctttggctgtttctggagaaagaaatcaatatcaatcccttccccggcattgacaaggagtgacagccatccgggagttacccggtttttgtagccgtcagacggcacaagcaggtaggaatggtaaagcccattgatctgcacataatgggagtgcttgaaatccacactttccggtgcgagaaactcgttgatccggatgtgatccagttcctccatgcgattttcctttgtataggcggacagtacagtgctgatccggttcgaaagcggaacctccgtacaaagggtacggtttaaaagggtgtagagaacatccgtagtaaattcatcctcattgtcatgggagaccacttcattcccgcactggtatagaaaggttttggcggtctgggaggctgtctcaagagcagcaaggatttcccgttcctcttcctttcggtttgcgttgaatggttcatattcaaagatcagaaagaaccgtctggatactgcttctctggaacttaagttctggacaaactggatgtagtcacgctgcagttcctgacagtggggatcggtttcccgctccagctccagctgggactgctccagatgcttattgatgtctgcttttttggagatcatcttgatctggagtttgacagggctgatctttaagtaactgataaagctgtagataatgccctgctgttccctggcacttcgaagcagaaagttgattggttcaatctccaggatcttcacgtaccgtccgtctgtggtatagacgattccgtttgcgattttttccaccggaagataatcctccaaggtctggtctttctttcgctttttccgggaaacgggttttgacgtggcagatgaggtgtcctccttggaaaccaccttttttttctgctctttttttgcagcccgcttttcggaaactgcccgtttttcttcctcctttcgtctccgggcttccgtttttttctgtatttttatctgtttcgccgcctcttttttctgtcggctggcttctttctgctcccacttcagataacggatatcttcctttgcctgttttttgatgccccgcttggtggaggtatcaaactgccggtgttctttttttttactttttggcggagctggtgcgtccggttcagactgtgggggagccgatgccattactttggaaggctctgccattttttctgctttccggtgtttctttgtctttggctctttgaaacgtggtttcctgcgtggctttccttccggaagactgtcggacctccagattaccctgcggttcactacaaaacgcagggcattcatcaaaaaggcagtgatgctctccccgccgattccaatcagggctaccattgccgctggaagtgcggtcatgcagagaatgatgatgcgggcagtcagggacagcggcaggtggaaaacagggataccgattgccagggaaagaacaatgctttctatggcattgcggatgtcaaaagttccgtttaggatcttgcctttctcaatgaagttggaagggataaaggaaaccggtgtttcttctggctgtgtcatggctgcacctcctttttcgtatctttcgcatcttcggaaggcacagaggcactgccggattctgtgtccggagcttccgggctgtcagaagtatccggatacccgccttcctgcaggtgttcaatgtcctgcgaagtcagggacggcagggaatcatcggtttgcttttcgtaaacagtcgtatctgcagagacctgtaccccgtcttctccaaataaaaacacacccgtcggggtgtgataggtaaccggaagcgtatcctgatcggaaagtgaaaacatcaggcagacggttgtttcggtagggtagctggttttttccggcaggaaggtgatgcttgtctgttcttttttgacatactcttttaggtagacaggaaactgccctttgagagaagcaatctggctgtcggagaaaaatgcttttaaagcatcaaaatccagatattccggcatgggggtatcagaatttgtttctgttgtttcctttgccggttccctgcctttgtttccggaagcttcttttttctggcttttccagaaactggggagaaccagtccggcaagcagcagaaacagcatcagaaaaatggaaagaatcacttttgttctgttcataatggctcctttattttttgtcgaagatccagtaggcatttgccgtagcatggatttccgacatcatatcaaattcacggttaatatagttctttgcgtcactgtcattgggatcattgaccagtaccttgccgtttgccgtaacacctcggagtacgatgaagtgtccgccgctggtgaaaagtcctgcccgctgagaggagatgaccggacagccttcggagagtgcctgaagtaccgtattggcattgctggtctgtgtgacgctgccacagccgaaatgactggctgcagcctgaaagtagctccagtaggttccaactcccggcttgtaataggaattcccgcaccatgccaccgcatccggaggggtaatggtattcccggtcaggtagctggcgatcatggcaaagctggtaggcccgcagccggaagatgcgatggagccgccgccataaggaatgttcccgtaatcggtctggagatagtgcggaatctgcattccgtttgccggatagcttccgccggtattggtaatctgataataccggagaacatgctccacatattccttgtccccataccggtcataatgccagttcggacgggcacacatcatatccgaataagcaatggcgttttctttggtataaccgccgtcacgttccattgcccagtcgatatagccggagccgtaattgtaaccctgaagcgccagcttgatgcggtccaggtcggtaggtccggtacatcctgctttatccagtgcatactttaattcctgaatcccacattcgatggaataagcaggatcggtgatgccgttggggacatgggggtatttcttattaaagccgccttctgccgcctgcatgggatcgcttccacgcccgccgctttcctgcatcatgactgccatgaggagttccacataagcttccatgccgtatttctgtgcgacctgctggatggtagcccggtaagccagcacctcatcgctgacacctaccgccatggcaagaccggaagcggagccgccaaagaacatggtcaggttttccacataactgtctgccgtttttttctgcttatcggtcagatgaaagacgtgatctgcaaagtaggcatctccggcatagctgaccgtgtaggtatggcgggtaaaagtaacctttctgggtggtgcattttcctcttccgccggaacttccaccgtggccgtttctgaagtaacgtcataagaaaaaagcccgtcctcgttttcccggatcaggcttttgagtttgctgatatttatatttttatagtcatcctggctggcacaaaactgtgcgatgagctggttcgcatttacgatgatactggaagcgtaaggatcgctgatagaggcagtatctccttccgggagtctggcaatttccgcattgatcttagcaagcagtgcatcatggctttcctgaagcacctccacgattgcctgattggaagcccggatattttcactgattaccgtgttgctggtcagtgctccggtattttcagagaggtctccgaagacgagtcccggaagcatgacaaggaacagaatgggaagcatcagtacaccgccgacggctgctccagttttcgcaagggtgcgcctgtgccggaatactgtaccgatgacagcaagaggactgcccatcaaggctgtttttggcatgttacatacgctcctttcgctgtggggctggcggcagtttctggacaatggattcattgtaggctactttgccgctgccggaagtatatggtgttttttcgaccgtatcctgtgcatactgcttgtaccaggtggaaccatccacggactgtaccgtagagtaggagccctgagtaggagctgcatactggtcggcatggtacagggcaaaatcccggtttccggagcttccggtttcggtaccggtgatccttccgccaccgatttctacattatcataggaagaaccgccgcccggattgatgcccatataggaagtaaaggctttctgtgcgtctgctcccttgatggaacctacctgaccgtaatttccctgtgcaatgttgctgatgacctgattggcaaagtctccgcctttgttcagggatgactggtagagcatgtttccgatactgctgtgttcggtataaccggttgcggaattgaccgcttctctttgtacctgtcttcccactgccccggcaagcccgccggataggaagcttcctgcgacagccgcacttccgggagaagaggctttgtggtagccgccaccaccatgggaacgcatggaaccggtcaggctccgtcctgcaatcagaagttcagccatcatgtttcctccggtattgccgacattgatgccaagcgatgccagaaaagaatcaattttctgggatacctttaaaaaggcaatggcacacaggaaccagacgaagacatttccggttaccgcttcctttccctgactggcaactgccgcttccacgtctgcttccgtaagctccgctgcaaagaccggcatggagcaaaacagtaccagacaggcagttagtaccaggaatggtatgagtttctttctaagtttcattttggtcctcctttcttatagggataacggattggcaaggaaggtgccgaccatagaagtaaacagccgcaggcaccacgcattcatcagaagcaaaaagaactggccgccaagcatccggcaccagcttttgaagatatttccggttgactggctggcacccatggaaaaagctgccggggctgtgtagaccagtacccccagaagaatatagcgttctgccgcttcaaagagcagtttgatgtagttccacgccagaatcagtaccagaatcagtgcaatgatggctaccgccccatttgcacagactcccaggatgactgtgactacggagttaaaatccgcaaattttaaaggcggcaggtcttccgtcagaatccagttgtacggtgttcctgaaatcttcaggagcagatccacaatatctttcgcatagaaggtgagaaagataaagaggaaggaacggatggacagcttaatgggatcttccgcttcgataccggctcccataaagtaatttttaaagagctgccatacccagtttaagaggatcagcccgatgcccagtgccagaaagacctgatacatggtctcggcagcaggaaagtagcgaagaaacgtatccatggaacagcccagagcaccgaggactgaagtggtgatcagatccagaatgttcatgacctgttcggcaatccattccacgattccgtcaagtattcccatagtggcatctcctttcgtctatccgttccattttccgcctgcaaagaacggggtgatgtaagccatgataaagccaagcccgtttaagatcgcccaggtaatgacgatacgcttgagccatgcacgtgattcgtccacggtttttccgcttttggaaaaattcatcatcagaagggcaaccgatgccgttacgactgcagcaatggtggaaatgaggataatctggttatagacatccttcatgatctcattggctttggtccagatggtagcggcaaaaaccggctgtgtgtatccgcagaggactgtgacagccagaaatgcagcatacaggcatctgccataattgacatgccgttttgtgtccggcggagcgtttttcagtttgtgtttcacgtaaaagtacctcctttttataagagcggcaggagaattacctcccctgcctttgcttatggttttcctgcctcaagaaaggacgcagcccggtcaatgcaggctgcgtcctaaatcaaagtatgaaattgtaaagatcctcctatcttacagaaaaaacgcagcttatttgccgcaggagaggcttcccatacggcagtgctgcgtttcgttctgcatataattttgacaatatcaattttaacatgggtaaattaccgctacaatcgcaggactgtgccagttacagacgatggagtgccaaaaatgtgaccaacgctaaaagcgttataaatgcaatccttatggatactgtaagcgtgatttgcaaccaattatactggatttacatgactaatgctttaagcgttagtgaatactggaaggaggaggtgtgcgtgtgaaaggaatgggaaaggcaatccgcaggtacagggaagaggcaggaattacgcaggagagactggctgaactggtggatatcagtaccaaccatctgggtgcgattgagcgggaagtgaaaacacctacgatggaaacatttgtaaagctgttgaatgtattaggtgcggaaccgaatgaagtgctgaaggaagtgattcctcttaccagaatggaacatacttctgtagtggaaggaaagctggaaaggctcacaccgaagaagcaggaaagcgtgcttcggatgctggatgtgataattgaagagatgatgaaatagaagctgtctgcgaaattgccgcaggcagtttttttgaaagctgtatatgcaataaaacacataaaaatatgcgatttatgatgaaagtgattgcaagatttgatatagtaatcctaaaagcattataaaactaattcttaaaggatgactataatatgaaaaagggatatgtgggattattggcatgtgcgtcaggaattctgatcggactgggaatcagccggctggatctgacaggttatcttgaaaaaacacaggagcaggaatatcacccggtagaaagaaaggtgcctgaatcagtagaaagcaagctgaaagatccaaaacagtgctggctgtgtggaagcgatgaacggagtatgatggattatttccggaagtttgacgatctgggagtgatctgtaccaatcactggtatgtgatggatatgcatatccggaatcatgatgaggacgggaatcttaccggcccgcagggaaacgggcatatgggttataccgggacaggagaaggcggctgctttttccatacggagcagatgtcggattacgggatttccgaagtatcggtggattacggggaagatagtatcttcgatgtgaaaaaagtacagaaccatctgtgtcaggaatgcctggataagctggtggaaagcatggaggtattctgtgaggaaacgcaaaaacccaagccccgtgatctggtactggtggattttcagacattggagctgtacgccattcaggagcataatgcgggatactttatccgggattattatgtggaaattgagtcggaggaagatggggtggaagtaaaggcattttactgcccgaagcttaataacgggaaaaaggatggagaataaattgaggtttgcattggtgaggagtataatgtaagtacgtgttatgtattggaaaaacttgaatttagcagaaagaaggattgttatgaaatttatcaatactagaaaattcacatggataatttgtataataggatttttgcttgctcttgtaagtatatttttcttaccgagtattattccagtacattttgcaaatgggattgcggatgattatggaagaaaaatacaaatatttttatttcctatattacaagtgcttatcacttttttgactggacgagaaaaagtaaaatattgcctgacacattcaaaaactttcttaacggacattcagtttaattggatgatagatggtgtacttttattggtaatgtttgcagaaatatgggttatctatgcttcatttgcatagaaatacttgcataacaatttacatttgattgagcagataaaaatgatttgaggtggtagcaatgaaaaagcgattgggaatcatagccggaattttaggaattgtattggcagtcattggcattgtactgaagcagaaagaaaacacagccgtttctgttattggtggtgcggatggcccgacttctattttcatagcagggaagttaaatggtgataattttatttttatgattgtagttggaattattttattgattttggcaggagttattttttacaaacgtaagcattaagttacagttttttagactgtgtatggcggaagaaccgggaaagtgtagatatatcatggggattttggaaaaaaataaaaaaagtaagggtacagcgtttgtctatgatgagaataatgattactataagatggaaataaacgggattgaatttgtctgtgacagtatacattccgattatgagaagcatgcagttgaactggcacaggcgtatgagaaaaggctgccggatatcgtggattatcttatgccggatataaaggagatgtttggaattacaaatccagatgtaatagcaaactcactaggaaagccgagtatagatttggatagaggaacactgacttatctggagcacacaatggacagcctacatattattgaaatggaatttgacggtatcttcacggcattctataactcctgtattgatggataggactttagtaacatagagctgcagttgtctacagcttttatccagacttcggatgttacagagaagcaatcagaaatggattgatcgatttctgaagcagtatccggtgaaatccttgaacatatgaaggaaaagtatgtatgttaattttatttttattgtagacaaaagataggactgatatgataaaagaacaggttattacaaatagaggtggagtatttgatgcagaaaatattattactggaggatgacttgaatctaaatcggggaattgccctgttactttcacgggaagggtatgaggttcgtcaggtttatacaataaaggaagcaaaagaagcatttcaaaaaggagattatgctcttgttatcagcgatattacattgccggatggtacaggactggattttggaaggatggtacgtgcaggtggagatacatatcttatctatcttacggctttggatcaggaaatagatattgtaaatggttatgatacaggggcagatgattatattaccaaaccattttcactgatggctttggtgtcgaaggtgaacgcattgatgagacggctttctaaggtacaggcacagattatgtcttccggagagattacggtgcatatgaaaacgatgcaggtgtataaaggggatgaaccagttactttaagtaagaaagaattctctctgttgctgtatctctgggagaatgcaggacagattgtttcaaaagaaagtatcctggagcatgtatgggatatagacggtcaatttgtcgatgataatacggttactgtcaatataagcagactgaagaataaacttggaacagaagagatagcgaatgtgagaggactgggatatatatggaccggaaaggtaaacaaaaattaaaacggtattttatcgtatatgtaatctttgcagtattttttacagtaggaatgtatctgataacaaagtatgaggaaaatgcgaaagcaacgcagatagcactgctccttgcagaacatcctgaactggaaggggaaatagttgcaatctgggaaaagtcaggaacagtagattttataagagaccgggacgatcagaagatagaaagagtcgtacagatgctggaagaaacttatggttatcactcagggagtggatcttcagatgtggttataaggattatctggggaattggattactagtgggagtcatagtatgtagcctgttcttgtacctggaccgaagaaaaaactggagcagatacggtgatgaggaacaattacagcaattatatgaatgtctgcaggaattcagaaaaggaaaattccaaacatatcctgaagaaacatcagaatcggaacaatggttaaaggtgtgggaatctgtaaaggagctggggcaatatttcgaagatttgaaggaacgtctggagcaggaagaaaatggtacgaagagtctgattacagatatttcccatcagttgaagactccgcttgcatcactccggatgagtcatgagctggtggcagaaaatcgggttacaggagaagaacagagggagtttctggagcaggaatcacaggaacttaccaaactggaacagctcttgaatgaactggtaaatctttcaaggctggaaacacatatgatccagatacattcgcttcatgaaagcctgaagaaaacgctaacagaggctgtcagtcagatttatatgaaggcaagaggaaaagatatttccattcaggtggagatggatgatgatatagttgtgaaccatgattcaaaatggacggtagaagcattaacgaatatccttgagaatgcagtcaaatattcaccggaacatacaacgattacagtgaggacgcaggagctagcaagcaatgtgcttattgaagtagaagatgaaggaatgggcattcctgcggaggaactgcataagatctatcagagattttaccggggaaggaaagcaaaggaacaggtaaaagacggagcgggtgtcggtctgtatcttgccagaaagatcatagaagaacagggggggacaatagcagccaaaagaaaggctgagaaaggtatgatatttaaagtgacactgccgctcataataggagaatagtcggaacccttacaaaactgttatggttgttgtaagggttttgtaatgcaggaatgttatagtaggggtatgaaatggaaaggggacttgaagatatgagtagtattttaaaagtagaagatctagtaaagtattatggagaaggcgagaatcaggtgagagccgtggatcatacaagtttacagatagagagaggcaagtttacagctatcgtaggacgttccggctccggaaaatctacacttctgcatctgattggagggcttgacagaccggattccggcaaagtatggattgatggaaccgatatctattctcgaaaagatgataaactggcacagtttcgaagaaagaagataggatttatctttcaggattttaatctgattccatcgctgaatgtgtgggagaatatcgttcttccgctgggacttgataatcgcaaggtaaagccgcgggaagtggaagatattctcaaaaaaatcggactgcaggataagaaagatgcgatgccgtctgctttgtctggtggacagaaacagagaactgcgatagccagggcattggtgacaagaccggcgataattttggcggatgagccgactggaaaccttgattcccagactgagctagaggttatgagcctattgaaaagctgcgtgtcggatttcgggcagacgcttatcatgattacccatgatgaaacgattgcccagatggcggatgaaatgattatcattgaagatggcaaggcggtgagaagataatgaagatgacgaccagagttgcatattgcaatatgcggcattataagagcaaaaacatactgattggaattgccattatcctgacaacattactgctgttcgtaatcccatcaatcggaaaagatatggtggaagtgaactttgcggtaatcaataagatttatccaacatggcatgccctttatcggaacgtggacgagagtacagttatgaaactggcggcacatcatgatgtgaaaacttacggactccgcagcgatgcggggtacatgaatctggaagatgcgacggtttccatgatgtatatggacagaacagggatggaactttataaagtgaagctgaaagaggggcaacttccgcagaaagaaaatgatattgtggtttcaaaaggaatactggaagcattaggacagaatgggaaaatcggtgacactatcacagtaccttatcagattctgaaagatgacggactggattatacgaaggagaaagactttcgaatctgtggttttttagcagataatgagagcagcaaagaacaaaaacaatatacatcattggtttcagaggcctttctgaaagcggagataccggtagaacaggtgaaatatcggtttttacttcaggtgaatggacagaaaggaaatacgactgcagattatacagagacgatacagaatattgccagacagttcgggatttccgaggatgacatgaatattaataaagagtatcttgcagcaaattatgtggatccggctacaattccggtgattgtaggaatcatgcttattgttgtattggcgggcattatcacaatttatagtgtttattatgtatctatgaaccagagggttcgggaatttggaaagttaaaggcaatcggggctacgaaacggcagcttagacaaatcgtactaagagagggaatgggagtggcgttgtttgccattccgataggacttttgatcggaacagttgctgtgaaagttgtacttctccagtttgtagaacatgcaaaggattcaaacgtacttataacagaggcatacaaggttgtagctaaaggagaagtccaactttattattggtggatttatctgttggcaattgcagtgactctgtgtacagtgtatctgtcactgatgaagcctatgcgtatggcggcgaaggtatcagaaatagaagctatgcgttaccagggaggcagtaagcgacagaaaagcagcaggaagggatatcaatttctgaatatcggacgactgaccaagagaaatcttgcagagaataaaaagaagagtactatcacgattgtatctatggccgttaccggaatatttgtcatgatggtagcaacggtgctgtcttgtgcaaatccgatggaaagtgcaaagagttcgattgtggggcaatatgagatttctccaattgtggaatccgggaataaagagcatcctgaatatgaatgggcggaggttcaaaagaataatccattaaatgaaggactaaagcagcagatagaggagcttgacggtgttgagcgggtagatgtgtttaccgcgttgaaggtatcaggaggaccttttgaagaaaaaattggaaccgaatttatcaatggagtgccggaagaatacgcagaagagctgaaaaaaggaatcactgaaggcaatgtcacatacgaggaattgaaatccggggataaagtgattctggaccgcgcgctacttcactggtatccagatattaaagtgggagataagctgaaactcaatattcatgatggagataatacctttcaaaaagagattgaagtggcagcaattggtgaatatggaagtggtctgacaaactataactgtcttatcatggcaaaagaaggggcagagaaacttaccataaataattcttccagctattttcaggtgattgcagataaggattatgatgaggcactggaagcatctctacaggctattgtggatggatcaggcagactgcagatgcgtacctggaagaatgagtacgatacatgggaaaatgccatgcagatgactagaggtgcatgttatgcatttatcatcattctggcagcaatcagcattatgaacttgattaacacaatgatcaatagtgtccatgtgcgaaaaaaggaacttggcatgatgcaggcaatcggaatgtcggaccgtcagttgatgaagatgctccagttggaaggtatattctatacagtaggcactcttattatcagtatcggagtgggaagtcttgcaggatatccgttgtttttatatgcaaagcgtacaggaatgtttgatatcagcacataccattatccggtaacagcagctattattataattttaacattgtttgtgatacagatgttattggcaatattcattgcaaagtcagtaaggaaagattcattgatagagagaattcgtttcagtgagtaagaatataaatttctgatgtttaatgcagatactaatcaatgtcataataaaaagggggacttgatttctcaaatcccccagtgtataatgaactcaagaaaggtattcagatgcaaaatctgatgccctcagttaaattttatattctatgtataagtcatagcatccaaaactttcctagggtcgtggatgctatttcttattatgtcgatctatataagtcaaagccgcaaaaattaccaatagtaaagtcaatacttccattgtattcatgggcatcaccctccttggatactagagggcaaaatcgaaatgcatccgtctttccggttcagtaataccgaatcagtataacacgttaccgttttcagtacaataaggtaatggtctgaaaaatactttattctgtcaccttatgtagctgtatcgtgagtatttgctggactaattggtgctgtatatgaaaaaaagctatttaaaaataaggtggaagccttatatggtctgcttgatgatgcgggtgatgatgccgagggcaacattacgctcttcatcaatatgcgtcaccacaaaggatacctgatcctttttcccgactgtccggctgtcatagcaggagtgggcaatggcattgacaccgatggagagccggacaaagacggtgcctttatggatgtcttccacagttccggcgtattttccctgaatcttacattttttcatgttttccttgctggtgttgccttccacacttttgacatctgcgtggacaatgacctgctccggtgagtctgcccgcacatccaggatgcgtaccaggatgtgatcgcctacctggaagcgttctctggcatcacccatccagtcgaaggacaggtctctggcaagaatggaggtttccacaccgaaaatttctgcccggactaccttttccgcaacagcaatgactcttgcctgcacgatacggtcttcataaactttcggcattccggaagcatctttatccagatagaagatctggcgtttcttcagcatcgcttctttccggctggcgacaatgctgcgtgtcttcggatctaatcccttaatcagaaaatcaatctcacatccaagcatattgttgaggattttgttctgccgcagagcaagctccccataatcgtgtgcttcatcctgcatgagatggatcatcatctcagttactgggatgacagtacggaaatccttgtagtaaaccacggcaatgaggctgccgttttctgttttctcgataccgccaagcattccggttaagatccggcgggtacggtaggcattctggatctcatgccaggtaaggtctgaaatggactgggctgtttccagcttcgcatcggaatccagagttaaaataggtgtgttggttgtttcgtttggcatcatagtgtctcctttcaaattatgacatgatagaatctttatctaaaggaaccatgtctgtgtgatccgaatagttatctgctgagaagtcatccgggaaatcgtgatagccaggttcctgataaacgctttgctggtcaaagtgcggttcagcttttttctttttctgctttccataagaagcggtttttttcgggtgggaagcaggaatagttggagtgtacgtatattcttcactacatgctccttttctccattccggaatatgttcggaagccttccggggaatgagtttttgggcatccgggtgcagggtgtaatcgtatttttctacctgcagtaccttctgaccacgcaggataatcagtgcagtatccagcgggagccgcaggatctcatccggagttaagagctttcgtttcccgatggatctggtctggcggtattccggtgtataatcggataccctccagctatttaattgtttggcttcgctgctgacaccaacggtcacatcaccggagcggttagagataaatgtagcagttacctcatccgtacagcctaaaaatagctgagtgtcgcagttcccgatgatttcctgccattggtttaagggataccggttctgcatctgaggcaggttttggaaaatgcaggaaatactgaggtttcgacttcggatcacggaaatctttttgttgagcgataggattgctcccgtattcgccagctcatcagccaggatatgtaccggaaccggcagttttccatcttccccataggtgtctgcataacggaccagtttgataaatacgaaggtcataaacagggaagaaagaaaatcaaaagtgctgtcttgatccgaagtgatgcagaagtatgcacatttttcttttcccggcagcgtcaggttgatctcatcataggaagtgatctggcggatcagcttgttctggaatacctgaagtctggaaccgagtccgatgatgacgccggaacgtaccgtgtcacttgcctgcttatagatgcagtaggggacttttgccggatgggagaccggaagcaggtcaaagaggctgttcagttctttttccgaactcatggtcaggagtttgtatacctgtccgatattctttgcctccggtgggaatccctgatccacatagagaatcagagcttttaataagttcatctcggcattgtcccagaagtgatcgcctttggcagaaccggtattctggatgatgacatcagcaaatacctgtgccatggtttcctgtccgccaatttcacccagacaattccaactatccgagttttccgggtttacaagattaaaggatttcacgatatatccggcattctcaaggtaagtggctgtactttcgtacaattccgattttggatcggtgatgatgaggctttccccgcgggcaacacactggaagatcatgttgcgtgcaaaggcccggcttttcatggaaccgctggcaccgtaaacggcaatattccggttcatgcgggtatccttcgggagacaaacggcttttccgttcagttttccaagaatggttcccttgtgtttcttgacatcattcgtaagctccagtacctgatgcatttcctccaaagtcataaaaccggaagtcccataggttccctttgtggaataattcaggttccggccccggtctgttatttccccgtttcggtcaaatcccatacgcatgagaaggaaggtcaggagtccaaaagctgccagacatagaaaaatcccatacagattgtacgggaaagcagtcagggcatccagacaggcgagcgggtgcggggaggggatctgcggggcagttccgtttccggcaaaattgccggcagattcccaggtctgatagttgcggataaattgagcaacatagcctcctgcatagagggtgcagaaggtgatcggaagcatataaatgagcttccaccatttacggttcatgtaaaaacccccttttgaatttgcaaaggtcaatactggagaaatggattgtggcagttaagtattttttcaggaccggaatctgaaaatcgaaacagatcaggttcccggatctgccgtatacatttaagccggtattgaaccggttgattcgctgcatgtcaaaatcataagcaagaaggatggggttcccggaagcatccgtggcatcatgttccagtggaattgaatcgctgcggcagcccagatcggacagcaggaggttgtccagcttttccatgatctcagggtgaaccagcagttttaaaagcacttccccttccggagtattgggaaggtaatggaaatgctcgaaggaggtgtccagcataaacaggctctttttgtagcctccggtactggtaaacagccggaaagccatttccatgtcggttccggtcatgattgcccggatctgtggatgtccgttgtaagggtagccttgcaggtaatgctgcaggaaggcgtttaagcggacttccgttcgatattcccatttcaggactccgtttcccgtgttataaaggacatagacacattgcggtgccatcaggatgcccatgctgcgggagttcctaatcttcgtggtctccgggcccaattccttaatttctctggaagcgtaaaaaagaggaaggcttcgcataccgatggaaccagcttcgcggtgattacagaagatgtcaggttttacatccggataaaagggaatcccggcatgaaggagtgtcagatacgtttcggctttctgatgtaagcggatacgtcgggatacttcacttcggatgaggttcgtctcggtattgccggtcagatagcactggaagcgtagcggcgagacagataacagcatctctttcgcagcttttgtaagacggtagcctctgagagcatcccggtagtgggtacggatgaggtgttccgccttcaaatccgtaatgagtttttccgcataggaggcacttgggatgagtctgtttagctggtctgcgggaaattccccgcacatccctatcatttccagtaagcggtatttcgtagtgtcaggtcttatcaaataagcatcacctcaattcagttcttacccatgcaagcctatacttgggtaaatctccggtggtttggagataaaaaaagcaagaaaacaaagttccctgcggtggttcttaccgatgtcggatttctgcctgagaagtcaggagattttccgacatgctttcgtgatgatttttctggttctgcagccatttcggaaagtcagctttttccataaccgataccagtgtacagtcctttaagccaagctgtgtcgtgtagtaggaatcacagaaaaagccgctgtcatctgtcagaacataagtacaaagtgtatccagaatctgtttaaactccagattgtcataatcccggatacgtctttgaggaagttccctgtcatatatttgactgaaacatatcacgcagtcacgatagaggggcagggcattttgttttacatactcccgaagcatataattaagcggttcatggagaaatgcagtgtttgtgtggactcttcgtttcggaagcagtccgggaagcgtaatggtgagaatcccctgctgttctgcaatccgcattccctgtgcatctgccgctttgggaagataagctgcttgatttggggagagagccggacagacaaggttacgcatctggcaggcaatccgctccgcccgaagagcagcactgacgctcagttcctcaaaatttttatcataattctggatatcagtgaccttcagagcgtaaacggtattcgtcagtttttgcagctccccttccagtttttcaagccgctggtaaatggttggtgtattttgcgtcataataacctactttctcatgtagtaactgacagcaccggattcatttacaaggcagtaagcggctacatcatcaatggtgattttggcagcctggctttcggattctaagacaatcaggcgtttggaaccatgtgatgggatactttccatcacatgattgatcagagcctcctgttcttcaccgatatagatgatttcgtattgttcatcttgcgaaaagaaattgagcttgattggaaattcgccactggtgtggtatacaacacctttcttaaaatccagcagtacccagaagcatgtaattatagcatagtcaggattctcagcagactgctggctgtcacaaagaaggtcatgctctttatcgtaaatgatgcgcccttgtttgatgaggctggtaatcaatgacttgatagactgctcatgtcgggagaaaagttgtaaaacctggtcatacctcagagtatggtaagtggtaatgaaccgtaagagcttggctccctctccttgatagatttcgttccttgttttcatgattgactcccttctatatataataggaaactttatacatatggctgtacgtacaggatacgtttggtattgtaagtatagtgtacgtacaaagtacatagaacctgctgtcagcgattgaatttacaggtacaaaaaaagcaccatctatgggtgctggaaataaggaaaactataagcaatacctattgtagcatgggtaattttacgcttcaatcgcagaagcaggtcatttctgtgccattttcactggttggcataaaaaaagcaggaaaccattttgattccctgcatggtgtattgttgtgcttttgtgtagttctaatgattacttgtctttataaaatgcttcgaaagcttgtgcgaagaattcggctgtaccattgccgtatttttcatctatcataggtttgattttttcattacggtaatattgagcctgtgcaaccatcagaccgtgttctttctttatctgtgaaagttgtttcataagaaaaccgtattcggaaacaagttctcttacttcagaagaatctggtgaacatacttttttagctgctaatttgtataaaagattgtcaaattgttggttgtaactttctgcagcctctttgctaataggattgttggcaacagacaggaattgctcttttcctccataccactcaacaactttagcatagcctttctgcatttcttctgatgaaactgtcttaatataatgctttttccattcttcaatgcttccaaactcttttacagcaagttctttcatattgtcaggcatatgttcaaacatagtttggaacatttcttcaacttccgttttactaaaaatcgcaaaatccattttattctctcctttcaggatatcatcaatgctggcaatcagatgttccatacgttctttctttgctaccaacatttttctctgcatttgcaagatctggttcctttcaagagcaggattctccagaacagctttgatttctttcaaaggaatgtcaaactcacggaaaaacagaatctgctgtaatatttccaatgccctatcgtcataaagccggtatcccgcatcacttttttgtgttggttttaaaagcccgatttcatcgtaatagtgaagcgtgcgaacgctgatacctgtaagttctgatatttctttgactgtcctcatagttgctgacctcctgttcctgataagataactgtacgctatgacgttccgtgagagtcaatatatattttgcattttttagtataacatttttatgatattacgaaaagccgaggagataggcgatatgtattactctggaaagaacttgttgagcgtatccaatgtctcttttgcagtaaatccccaaaggatggtactgagtgcttcaatcgcagccctgcgtttccggtaataggtgcggtaggaaatattggtgatgtggtgagccagcttatccaatatctcatctgtatttttcatttcctgtggagagagaaaagcgtagtagagaatccagtaatactgttccccatgcttgtgattgttccggaggagatcgatggatgattccaaaagcttcagcatctggttgcttctggcaatactttttgcccgttgttcgatgtcgcttccggtaagatcagccccggcagcatagatggagtccagaaatttgtcgatgtcattgtcgtattggagcttaaactggtgctccatctggtgtacgactaccttcaggctgtaggttgcatcccggtatctgcgtaaaaactgataggtgtcgtgaaaacgtggatcttcttcgggtgaaggaaatccctgtgtattgcggtttgccatgtctattccccccctttcagtgcagaaggctctgccacggcaggcatcttttgggcagactcatcccctggacttacggacaactcaaaccgataagcggcatttccgtagggacagataatatttagagtaaatgtattaaatatatctttgcaggctgataatggagataatatatagcgggttttggagcagtggcaacatggaatcccttgtgaatccaatagttctgcgactttttgcacgataaatttcatgtgtgaatctggaacgcaggaatcattttttgtaacggtgatttgtgagtctgtgacagtttctgaaacgctaacagaagcagaatcctcaatagtgatttcttcaggtacatggattggtaattgcatcttcatagcgatctcctccttgtcaatcataacgtcgctgatattaaacatcacggacaggtaattgttgagataaattacgcttccgtgttttcctgtaaatgagataagtgtaatgtattctttttcctccagtttcttcaagagtcgtgataccgatgcctttgacagactccacctttcacccagttcattaaagctggtaaggggatttccggtattatcccggtaatagacaatgggaccggaatcagatcccaggacagaggaatcgttgtaaactgcatgaatccacagatccagaataacatccatttccgagcattttccaatgccaattagttcgtgaactttggcaatcgggaaaaagaaaaaccctgtatcttttttacagggatagttgtattccaatacggtattgtctttgggccagtctgatattttgaatttgaccaggcggtttttgccgagaagagagtaggtaatgtaattctgctcttcaaaaaatcgaaggatggacaacgcttgatgttggaaacggcagcgaaaccattcctgaagatctgtgactgtgcagatccactctcctggaccaatggtataggtaatgtgttccatccggcggtaggatgtgcggtaatttgcataggagcataataccagataataaaaaagaaaagagcccccggtagttcggatgctcttggtagtgattaaagtttgtatgaagtcacggtaaatgcgacagcgtggaaattccacgatttgtttgagttctaatttgtaattcatggtgatcttcctttcaaagtatatttaattgtaatcggacttttcatagtgttggtatcaagaagaagccgatggaagtatagcaagtagtcgtgtcactcattgcatttttattgcatttttaaaatttagattatgtggctatgttgctcttaactggttaaaaagcctttaaaatcgtctatatgcgttaatactccgtactgtctgtctggagtttgaataagagccacaagtcttggaacccgctaaacaagcggcttccgagactttttcttttgctttgctactaatttgctactaatagcaactactctttttttatcgttttcgtgtgcttgtcattaactttaatagcaagaaatcctgatgattgctggatttcttttaaatgatctttctttgtggcatctggatgattttccctgatgcggtatttggcggtactaacgaaggtccaaactgaggtcggattgttacatctgagcctttgttctgagcctgaggcacctcacgggtgatacctgctgcttcaagcagagggttatcagatggtggctcaggtgttggcaaatctgttgcctgcaatgattccagactatgcacaagctcctgctgtttatgtggaaacagatgggagtatgtgttaagtgttgtggatactttctcgtgtccaagcctgtctgctaacatcagggcatcacagccctgattaataagtaagctggcatgcgaatgcctgatatcgtggattcggatcttctttacacctgtgtttttacaacctcttatcatctcgtgtgagagatatgattttgttaccgggaacagcatttcatctgcgtcaagcatataccttgactggatatagtctgatagctcctggcagagaaaatccggaatcggaatctttcgcttactttttcttgtcttaggtgatgtaaatacatcttttccgcctatccgctgatatgttctgttgatggaaattagcttgttatcaaggtcaatatcagcaggtgatagagcaagcaattcaccttctcgcataccagtccagtacaggatttcaaagcatatatacgatagaggcttgtcttttacgccctcacggaaagcaatatattcatcgtaagtccagtaatccatttcctcagccttcgcttttccgatggtacctgccttgccgcagggattggtgttgagatcatagaaccgcttggcgtaattgatgatgctgttaagctctgtgttaatctttttcagataggtctgggagtaattattcggcgaactcataagcttcgcctgccatcttcgtacatcagaggctttgatttcatttatcggcttgttaccgaaaaatggaagaatatgcgtctgtagtaccgccttttttgtcagaagagttgactgcttaagtcttgcagccatatcctccatataaatttcataaaggttttgaaatgtcatgtcaggattggcagactgcttttccagaaagtccctttcaaatcctaaagcttcctttttggtggcgaagcctcttttccacttctgtttcttgattccctgccagttcgtgtaatagaacttggcgaaccatttaccagttttttcatctttgtaagctggcataaatatcatctcctttttgtaaaattgttgtgcaatcatcaaaaggctatgatataatctacttgttcagggtgattataaagccttcgggtcaatcacttacatagcttcggttattccttttgcgagaaggagtatgccggagctttttctttactaaaggtgtaagcctgcaattattcagtttctgaatcggtttcattatccagtctggaatccttataatatgctaacatatctgatttccatgaatcaaacttttcttttgaaagctttcctgtctgaagcatattcttctttgttatccagttttccataaagagacagaagtctgcatcatattttccatcacccttgccgttaaccttgatcccggcagtccattcaggattttcaggaggtttggtattggtaagctcaaatgaaaaatcagtaagttcagttatgacaaagagagcgttgattacatctgacatagtgtggaattcatatgccggatattcagcggtcgtattatcttttggagtattagtaacttttgcaaataaaagctcctgccatggaacatttaattcatttgcaatctgttttaaaacatctatctttaatagtatttcaccagattcatatttctggatagtacgttctgatttgccaagcctatgtgcaaactccttttgcgtgattttctgtgccctgcgctgcttctgtattgcctttccgatttcctcaggagaagacatagtaagtttaatggaatcagagaaagccattctgttcaccctcctttatatgaaatagtccgttgtaaagatgcgtatcagattgatattaaatgaaatacgtatcagtaagtgacttgtttatgattgtacgattactttatcataaacaaaaacgaattgcaagtgcgtaattataaaaagttctattgacaaattctgaaaaggatattaagataaacacgaactaaaaatacggaataaataaagaacaggatagctgctttgtgaaaatacgtatttaaaataacaatttatgaaaggaggagctgcatgaagggtataaatgaagcattcatagatgcaggtgagataagccagatgcttggtatcgggatgacaaaggcatatgcaattataaaggaatataatgcagagcttgaggcaaaaggttatttcaccatgcggggcaaatgtccaaggaagtactttgaacagaaaatctatggttacgaagattattacaatccggattatgagccgcagcgtaaccggagcaaggttgcagaagaaatggattatgaaactgcagttggggattttgtgataagtgaacaggatgaagtggatatacagcctgaaacaaatggattgccggaagatggtgctgagatagcagaaaatgtaatatcggatgcggatgcaatggcaaaagagataactgaataggcgaaaccaatgtgggggcaaaaagcgcccccaaaaccacaaagtgggggcagaaagcgcccccaaaaccacaaagtgacggcaaaaagcgccaccactcagatgggcgataaaaaagttatggtggcggaaagtgccatcaaaatggaaaagtggtggcggaaaatgccatcaaagcagcaaagtgatggcagaaagtgccactacttttcaaatctggtggaacctcagccaccatacccataattgtggtggcacattaactaccacatatcatatacagggtgcaggtgctcctgccaagacggaaaattatgtaaacgctgatgcgtttatattttttcgggaaaaggtccgaccttttccgcatcttgcaaaacctgcaaaacctgtgaacactattttaagaaaggatgaaaaagcaatggtacagataaaaagagattggtttgatacagcattgaaaaattacgaaaggggagaaatgtatggcagatggaaagagaagatacaagtctgacaggaaagattataagatatctgtgaagctgtcggaaaaagatatggatattctgaaagcggcacttaagaggaccggaatgacagcaagtgcctatataagagaattaatccggacaggcggtaacattgatataagttatccggaagacagagcaagggcaatccgcatcatagcaggtattgcaaataatattaatcaggcagtaaagcttggcaattcacagggaaagttatattacagcgatattgacaaattgcagagcagtctgggtgatgtaaagaaaacattcggggaggtgctggaagtatggcgattacaaagatcctaaatatcatggaatcggaaggcagaaatccggcatcacacctgaagaatgctttggaatatattcagaatccagataagacagaagaatgtgtactggtgggcggtattaactgcctgccggatacggcatttgagcagatggaggagacaaagaatatttttcataagacgggtaaaaggcagggctatcatgtgatcatatcgttttcgccggaagaaaaagtaactgcagaacaggcaatgtacgtactggaacactttgcgaaggatgtgcttggtgatgattatgaggcggtgtatgcagtccatactgacagggagcatatgcacgggcatctgatctggaatagtgtcagtatgacgacgggcaagaaatacaattcacctaaaagcaactggaagaatcatctccagcctatcacaaataaatattgtgatgaacttggactttccataatgccggcggagtacagcagaaatccgaagaatatcagcagggacaaatgggaaagagaaatgtccatgaaagaaattattcttcgtgatgccaagatgtgtgcatatgcagccgggaatgtggagcattttaaatatctgatgaaaagacttggatatgtattcaagaaagatgcgtggatggaagtgcaggcaccgggattccgatattatcatagtctggcaaagatggatgaaatgtttgcagaggataggcttagacatcatgtagatatgccttggatgtcaaagccttacttttattcgtcggatataagaggattgcatagggcgaaactatcaccataccagaaacgattttttgcaacgctatataggctgagaattgtagagcagaaacgatttgtggttggtggagcaaagtatacggaagaattgaaaaggtttcatcagttacaggacgaatatctgatacttgtgaataatgacatcaaagatattgtggagcttgtgaatttcagaaataagcaggaagaaaaaatccagcagattgaggacagacagcatgaaatatacagagaaagctcaagccggaaacggaagattaagacagaagcacaatataaggattatcagatgtggcatgtggaagtgcaggaagaactggacgagcttaagcaggaaaaaaagaagataaagagacggatacagcttgctgatggcattatgaaagaggatttgtatatggcttattatacagtctcggaggatgaagagattgttggtgataaggaaattgagataccggggatggagaaggatatgctggttgagagaacaacgaaagcggttgttgagtcggagagagatgttgttgtaatgaatcagcctgctaatagccataataatggaaatggacaagaggagcaaattaatgttgccggtaaacaacagatagatttagaaagaacagaaatgtcaaaggttcacaatctgtctgatgagaatgtgacaagaatggacgaaagtataactgatgtaacaggtaaaagtgaatttgtggaacctgaagaaaaagagcctatagataaagttggctggattgtcaggagaatatcagagtttggtggttatgaaaatgtcagtgattctgataaggctgatatatttggattcgatattgctgatgtaagtggcagcataaggttgttctcggatgcaatgaaaaggctggggataaagctggatggtgatgagctttatgaagagcttcagaagatttatgatgagagtgttgatggagatgctggcaaagataaagcagaagataagatgtggaataggggcagaggaagatgattcctctgcatatccccgattcactttacgtatctgaattatatattgcaaatcgggaaacaatcgcaagaagttgcgattgttattgatgatgtagtgattctgtgatatcatataaaatatggtacatgaaaacggaggtcaaaatgaaagtattggtaatgaattgtagtcctgtaagaaatggtgcaacagcagaaattgttaatatagttactgattgtctggaaaagaaacatgatgttaaaaacatatgtattgatgattatgatataaaattttgcaaaggatgtagaaaatgtcatactacagcaaaatgcgttcaaaaagatgatgttgatagaataatagaacaatatgaatgggctgatatagttatatctgtgtctccatcttattgggcagatataccgggacaatttaaagcttttattgatagatgtactccttggtgcaatacgcatgaaccacatgcaaaaataagtagtggtaagaagggatatgttatcgcattaagaactggacctggtatgagggaatgtgagaggcttattgcaagcatagaacatttttatggacatatggaaatagagtgttgtgacaggatgggattgtgctcagtggaatataaagaagatttggaatgtaaaaaagaagagcttgtggaattttgtagcaagatagattaaatgaactgattaatgatggtggcaagtgttttagtaggattggaggagtgacagtgaaaatgagtattagagtagcaatgttggaggatgcactactagttgcggaattggcaattcaaatgtggaaatcacatactattgaagaattgacacaggaattttacgaatatattagtaaagagaatggtacaatttttcttgctatgatagatggatgtgcggttggatttgcacaatgtggattaagacgtgactatgtagaaggtacagattcaagtcctgtgggatatctggagggcatatttgtgaaagaagaatatagaaaaagaggagtggcaagagatatgttagaggcatgccagaagtgggcaaaggagcagggctgtgcagaatttgccagtgattgtgaactggataatgaagatagtctgaaatttcacattaaaatgggttttgtagaagcaaacagaattatttgttttacaaagaaattgaaggattctgttattggtagacaggtaaccgtaactgttgacagaccattaggtagttataatctaaattataaggatatggattaatacaccaatcacaaaaggaaggattaatactaatggaggaatggaaaaagatacagaaaacatataaaataagagaactaataggcataactggtatgattatgtcttttgtaataggagcaatttgtgattggaatgttcttgttcaaagtaatattttaattccgattgatgacatagaagcattttcattgactattatacaaatacaggcaacagtcggaactttgatatttacaattattgcattgatcacaggtaatatttctgattcttatataggagtatcaataagtgatttctatttgaacttaaaaccatggaaattaacgcaaaaagtacttattgttgtttcattgggattgtgtttggcaggcgtgatatttcattctctaggcttatacaatattgttttttatttatttatagcgacattaattgcaatattaatatcaatactagagatgtactctgcctttaagggaagaaataaacaaaatcaagaaatagaagcatatgtcaattatatgttagaaagcaatatagagtatgagaaaaaattaatcatatatcaggattttgttttggattggaaaaaggtggttgatttacaggataaacaaagttatgaaaagttccttgaaatttttgaaaagtgtatgtcagtgttatgggcttatagaactgatgaagctttagcgtctatagaacaacaatgttatagcatatcatattgccttttgggatcggagaaaaaagcgttaaaggaaaaaggtcttgaatttgtgcaggaagtatatgacgtattatggagttttatttataattgtattgcagaaaaaagaccactattaaatcaatacaaaagtgagtttcctctttttacagaaatttgtagtgaactgatacgaagtattgatgaaatgaatgttgaagaggtagaaaagagacttaagtttgataacttagctgattcggtattaagagctgcgatatggcttagatacaacaaagacaacgaggtttatgataaagaggacgaaacaaaatttaaaaaatatgaatataattatcaaagtgaaatcagtgaattaaattcatttgcaaaatacataggatattatttggaaaaacagaataataaaaataatataattaatcagcgtgtttgggcaaacgtattaaatagatggagtcttttttctacctataacattccagaagaaagagcagaagactttttaaaggctaaagttaatacctacttttgctattgctatggaatgatagtaaatggacaagaaaacattgtaaagatgggcttatatcttagtggaatgaggaacactgttagattagacaataaatatcaggctttattatatctggttgttcattgttatatctattatttagctgtaagagaaagcgatgattgtgttccagcggatattagacaatcggcattaaatatctgggatgacaaagctgtgaagggggcttttttagacttccttaatatgttgtcagaaaactcagaatggttgaatttagatattcttgatcaaatgtatggtataatagatagatttgagttgtttcctcaatatggagcggcaaaatctatgattattgagcctgtaacatcagatttttatttgttttttattctatttatgtctcacgaatttttcttgccagagttactggaaaggaatattgatgatatgcgagcattcagatatgtttcggagaaaaatgaagataaaacaaaaggaatgcttggtaaattatttagaatgatatttataggtaataagtctgaggaacaaatagataaagaagttgatttgatgtatgacgaccttgaaaaaatggttaagaaaaaacaaaaggaaagatacatcagattagcaaaagaagcacaagagaactatgaatcaagaataaatgaggaagagatatgtgaaaaaattaaagatgataccattaagaacataaaagaaaaatttgctccaatcctaattgagagtgatgaaaaaaatggaatcgtagatgttaatttattaaacttaattgattatactagctcaatgggaaccaaaaacagtacgaatggatattattcacatatggatggaatgttcttgtttggtattgcaagatttttatatcaaaggggagttgttgaatttaaaaagagatttgacgattttgctgatgataaagaatttatggaatacttagcagcaaataattttcatttacttcttggatcacaatatattttgaaaaatagggattatagaattagtgctgagtacaaaagatttttggaagattatgagacaatatacacaactgttttgcaagatggtatcgcgttgagaaggaattctatacaggtgtgcttgcatgatattaatgtctcaatccattctccaagtataaaagaagaaaatgtagaatatgacagggaaacaggaaaatattactatcctattttgaatggacttccgatagattttgatgaagatgaacttagagaattcctctataataatcgcaaagttataaacgtaactgcaaaaatatctatacaagtaaatgaaaagccatgtggaactgttttcactggtagaaaaagaggataatatttgttagatgtagaggagttatagtgatattggaggcggatatggtgatagaaaatgctataaaatatgtaaaacagatatttgcagatgattgtagtgggcatgactatcatcatactatgagggtttatcgtttggctatgcagattgcagagcaagaaaatgcggatatgttgattgtgcagttagcagccttattacacgatgtagatgatgttaagctttcaccggaaacacacgatactaagaaaaatgcagttagatttatgaaaaatagtggcgtagatgataaagttatagcttctgtgtgtaagattatagatgaagtttcttttgtaggaacggattcagttgtaccaagcacattagaaggaaaatgtatacaggatgcggacagacttgatgctataggagctattggaattgcaaggacattcgcatatggtggtagtaaaggaagaagaatacatgatccggatataaaacctatgactaatatgaataaggcggattataatcagaaccataattctacaagtattaatcacttttatgaaaaactcctgctgcttaaagatatgatgaatactgaaactgcaaagaaaatggctatgcatagacaagctgttatgaaggagtatcttgtagagtttatggcagaatgggaaggagaaaagtgatatgttggaagttaaattttatgatacggtagatgattcactattgaaatttgcagtaattatttcgcagagcaatggcaaatgggtgttttgcaaacataaggaacgagatacctatgaggctccgggaggtcatcgtgaagttggagaagatattttggaaactgctaagagagaacttcaggaagaaacaggtgccatacagtttaatattaagccaatatgcgtttattccgtcacgggtaagaatagtgtaaatgagaacggtgaggaaacatttggattattatgttttgcggagataagggaattttcaggtcagctggatagtgagatggaaaaggttgtacttatggatgagttgccacaaaactggacatatccgttgattcagcctaaattgattgaaaagtatatgcagatagaaaagcagtcttatagccagatacagttgtcagcaaaacagactatagaatacataaagaatactatcaagccgggaatgaatttacttgagattcgagagttatctgaggaaaaactgttagagttgggtgcagattcgttctggtattgggatgttggtgcatttgtatttgcaggagatgaaacaactgtttctgtatctggtaagcagtatgtaacttcggatagagttataggaaacaacgatataataaccattgatttaagtccacaggtggggaatatctggggagactatgcgagaactattattgtagaaaacggcatggttgtagaggatatagggctgattgaaaatccggaatggaaaagcggtctccagatggaagagaaattacatgcagaattgttacgttttgctacgaaggaaacaacctttgagaaattgtactatcatatgaatgagttcatagtggaaaatggatttgttaatcttgattttatgggcaatctgggacattccattgtaaaaaccaaaggtgatagagtttacattgaaaaaggtaatatgaccaagcttggcgatgtaaagtattttacatttgaaccgcacatagcatttccagattcaaagtatggatataaaaaagagaatatttattactttatcgaaaacgggttgatggaactttaagatatagattgggttgaaaaatgattagagaagtaaacaaaaatgatttagatgaaatattacagctttacctatatcttcatgagaaaagcattccagaagattcagagcagttaagaaatgcatgggagaatattataaatgatgtcaatcatcatttgattgtttgtgagattgatggcaaggttgtggcatcctgcgtatgtgtgattattcccaatctcacaagaaatgttcgtccatatgcatttgttgaaaatgtggtaacacatggggagtatcgagagaaaggttatgctacagattgcctaaattttgctaagaaaattgcagaagagaatcattgttacaagattatgttgcttacaggttcaaaggaagaaggtacattgaattctatcgaaatgccggttataacagttctgacaagactgcatttatacagtggattgatatgtaaaataaggagcaagattatgaaaaaatgagccttgcgacaccatgagcttgctcatatggtgccataaggcgaaaatagcaaggagacgaagacaacgtgatatatgaattagcaaagccagaagatatacaggctgtgtacaatgtggtgcagcatacaataaaaacaatatatccgaagtattatccaatggaagtagtagattttttctgcggacatcacagtgaggatgctttagaaaaggatattaaaaatggttatgtaagtgtgctaaaaatagatggaacaatcgtagcaacaggttgttttgtggatgatcacattacaagagtttatgtccttccggaacaccagaaaaagggatatggcacttttattatgaaaaatattgaagaacagattggcgaaaaatttgataaggcatatctggatgcgtcacttccggtggcagccctttatgaaaagcttggatttgtgaatgtaatgcatgagcgttatcctgtagaaaatggagtgatacttgcgtatgaagttatggaaaaggaacttcataaaatctcgacagatataaattatgatggaagaaaatttatccccaaaatgaattctgaaaacggtgaggttggtgaacagaccaactttacatatcatcagaatggaaatctattgtgggatgaatatagcggtggagatatattaaaaggttcgttgattggatcggttttatgtaatgggaaacttgattttgtgtatcaccacatgaatcagaatatgcaaataaagacaggtaagtgccatagtgtgccaactgtacaagaaaacgggaaaatagaactttctgaaaaatggcaatggacaagtggagattattctaaaggagagtctttgttagttgaggtgtaggatgttagaaagatttgaatataaaagagcaacaatggaagatatcgacgaattggtaagaacaaggattattgtccttcgtgcagcaaataagttgtcagatgatgaggatatgtccgttgtggaggaggaatcatatgcatattataggcgtgcgttggaaaccggagagcatattgcatatttggtgtatgataacggaaagtttattggagcgggcggtgtaagcttttatcaggttatgccgacctaccataatccgaccggtaaaagggcgtacattatgaatatgtatacggcatcggaatatcggagacaggggattgcatttcatacattagatttactggtaaaggatgcgaggaaacagggcatatcacagattactttagaggcgacagagatgggacgacctttgtatgagagatacggatttgtaaaaatggaagatgaaatggagctgaaggtataaataattaaaatagaaagcaggtatagcatgagaaacagatatataacagaagaatgcaataaaatacttaatttttggaaattggaagaatattttacaccatcggattatcccgaattgactttaacaataaaagagggaaaacaagatattccgtttgatgcatattataatgcttacagtacaagaagtttaccattaaaagaatacaaggcacataatgagtatttgagcaaaaaacataaatctgatgagaagttgtataatcgtgcaaatgtttattgtggctgttacaaaattaaaacctttgtggaaaaaatggctgaaaaatgtaaattagatatggaaaaatattcagagataaacgaattgtcaggtagattttatattttctcagttcagatagacttagatggaaaacttacagaggaaggtgtgcaaatcagtcctttcttttatgctgtactttgtatgataaaatcagaagacataaatgttaatattatgcaagaagacatatgcaagttaaatgaagatgtaaatgaattacttaaacagaatgatatacaaatactggagtttacagacataacgatagttaaaaatattgtgtttgacaaattaggagttgagaatgaaagtcaagtagggttagaaggtgcctcggataaggtttatgcatgcaaaggtttaaagaaagaagatgaaacgagtgacttttttagcttttacttggacgaaatagaaagaattcaaaaaaactataagaataatgagcatgtaataaaatataccacctcgttattgtctgataatcagaaaaagataatgatagacagcgatgttaatgccatgaaaaaatggttagaagtagatagatttccactggcaaaatacccatcaaagttctcaccgacattaatgcagcaattagctataaacatagctatatcagaaaaggatagatatgaaaaaatattctcagtaaatggacctccaggaacggggaaaacaacacttttgaaagaaataatagcgtcaaatgttgtgcaattggcagaagttttaattaaatatgggattgatggtggtaattttgtttctcgaaaaattgagtctgcatcaaatgctagttatatagaaaaatattatgaaataccagaagaaattgttaaatttggaattatcgttgtatcaaataataatggagcagtagagaatgtaacgcttgatttaccgaaatctggtgacatggaaaaagaaaagacgaggacagattattttgataggaaaataaatagggaagtgtatttttcagctgtggcagataatcttttgggagaagaaggaagtgcatggggattaatatcggctcgtatgggaagaaagtcctatgttgctgaagtgttagaatcttgtgtatttgctagaaaaaatgatgattcaaataaagtgacattggacctggcaagggttgatagtatttcgtggaatgaagctatagaaaaatttaatatagccaaaaaaaaggttttatcattaagaaaagatatcaaaaatgatcagaaacttttagtggatttttatcaggaaaaagagaacttagctaagagaaaatgggaattaaaacagttgactatagaaaaagagcagctaaataaaaagttaaatgaggtaaaaacggaattagaaaataatgaaaaggagactttagagcaggaagaggaaatcaaatatattaaagagcatagctctatttttaagaaactacttatccttctggggttaggaaaaataggtagacatgttgctgaaaaacaaaaatatgtcgatgagttaataatacagcacgaagacattaagcgtaggtatagtttgaccaagagaaatacagaagaagtatgtggaaaaattgaaaatcaatatagcataatctctactctagaaaagaaagtacagatacttgaggaaaaagtatatggaaataatgagtcattgaaaaacaaatacaaaaataattttgcggatagatatttctatgaaaatattaaggaatctgaaaattcacagaatgcatgcccatggacatttgacgaatatgatatggctagagaagaattgttttatgcttcattacaggtgcgaaaagcgtttattttgaattcgccatatataaaaagaaatctgtttgtatatcaggcatataacaatggaaaatatacaatagcagaaaaacaagagatgtttccacatttgtttaattccttgtcagtagtgatacctgtactctcttctacatttgcatcagttggaaggtttttaaaacatgcaggaaatatgagcttaggcatgctaataattgacgaatcgggacaagctatgccacagtctgctttaggcgcactttataggacaaggcaagcagttgttgtgggagacccattacaagtggaacctgttgtaacaattcctaaagtgttaattgatatacttgctgatagtacaggagtagcaaatgaatacaaggtgattgaaaattcagttcagactttagcagacaatatgaatgagtttaacggtatgattggagaaagacaggttggttgtccgttggttgttcatagaaggtgtatagagccaatgttttctatctcaaatatgatttcatatgacaatagaatgttcaataaaacgaataaaaaggaagattatttaaaacaagaacaaccatttttgataaaaaaatcaggatggataaatgttgaaggaacagaaaatggtagcaaggatcattttgtaaaaaatcaagcagagagagtatgtcaattattggaaagtgcactacatatatatactgatttatttgacacagacgataagatctttataattacacctttcagaacagtggcagagtcaatgcgtaaatttgtagttggttatttttcagcaaaaggaaatgacaaggaggtgttgaaaaaatggacgaaaaaatgtgttggcacagtgcatacttttcaaggtaaagatgctaatgaagtgatttttgtattaggttgttcagataaaagtgtaggtgcaatgaattgggtagtaaaaaaggctaatatacttaatgtggcatgtacgagggcaaaatacagaatagcctttattggaaatttaaatgattggaaaaatagaagatattttagggagtttattcccaaatttattgacacgatagatatgtagaatatatacaatgtgaagatggaataggagaaattatcatggctgtatcttataaaagattatggaaattattagtagataaaaaaatgagcaaatcggacttgcgtaaaaaggcagaaatcgctcctaacacaatgacaaagcttcgccgtgatgaagaggtgagccttacaattcttagcaaaatctgcaaaacattacatgcagactttggggatattgtggagtatgtgccggatgcagaaatttgggatttgtataacgagaatagagagcttctgggaaaagatcatgtcaggggcgaacagttaccgatagatggctaccatttggtggtgcatgtatggattcgaaattctaagggagagtaccttatctcgcagcgttctgcaaacaggccgacataccctttgatgtgggaatgtgtaggtggttccgttgtaaaaggtgaggatagtttattaggagcgatccgggaggcaaaggaagaggttggcgttgatttaatgccggaaaatggacaggttctttttacaaagacacgaaaaatcattgagggaaaaatctttaatgatattatggacgtttggctgtttgaatatgatggagaagttgatttgggcaatgccacaacggatgaagttgcacaggttgcttggatgaaccgggagcaaattaaggaattgtttgaacataatatgtttgtggagacactggaatacttctttatggaagtggacaaagaaaggagataaatgtttaaatttatttttgatttagcaacagaaccattgggattaccgattgaatggtattatgaatggattattctgttggttattggtgaaattgcatatcatgttgcatacgacaaggtaggtgctttatatcatagcggttctatatctggaagggcagcaggctcatttgttcattggataattagaactgttgtgtttgtggcagtttgggcagtgacatatggagtgatttggattggcaaatttgttatggcacataaaatacaggtcactattggtatatgtagtattgtggcggttgttatagccgtaaaaatattaatttggattaaagaacgaaatgaattagtcaaagtgccagtaaatgttgaagatgatgataaccggtaaaatgctttaaaaataaagaaagttggtgaatatatgaaggaaaaagaacatcaatccatagagtggaaggagtcatggcaggatgaatatttgaaatggatttgtggatatgccaatgcctgcggttgaacaatatacataggtacggatgacgatggtaatgttgtaggtattgataatgcaagagatttattagagcaaattcctaataagattacagatacaatgggaatcattgcagatgtgaatttgttatataaaggcgaacttgagtatctgcagataattgttgataaatacccatctttaataagttttcgtggaaaatattattatcgatccggaagtaccatgcgtgagattaccggaaaggaattggaaagagctttgttaaaaacgcagggaagaacatgggatggtgtgcctctgccaaaactgtcagtatctgacttaaagcaggatgcaatacagttatttaaagataaggcagtgaaaagaggaaggcttacgaaggaagaagtcagtgtggaagatactatcttgatggataacctgcacctaattgatgaagatggatatttgataagagcagcaatgcttgcattttataaagatccagagaagtgggtaacaggctcttatatcaaaattggctattttggaaaatcagattcggatttggtgtaccaggatgaggtgcacggccctttgatagagcaggtagataagaccgttgatttagtttatacaaaatatatgaaggccttgattgattatgagggtgtccagagaattgagcagtttatgttccacaaggacgcatttcgtgagattttgttgaatgccattgttcataaggattacagcagttgcaatccaattcagattagcgtttacaaggacaagatatatatttggaatgatggtgagatgcctccaaatcttgattctactgacaagttgtttatgaagcattcatcaaagccttataatccgaaattggctaatatctttttcaaaagcggtatgattgaagcgtggggaagaggatttgagaagattagggaagcttgtgcgttgtatgatggaccattgccggaatacgagattaatgaggctggaattatggctctgtgtaaggcttgtgataagtatttggggttgttgaggaatgatggtcagcatcctgaccattatcctaaccaaaatggtcaggatttgaacaagcaaatcattgatttttgtaaagaaccgaaatcggtccaagaaataatggatgaattttattttgatagcaggacaagttttagaagaaagtatttaacacctatgctgaaaaatggtgtgttaaagatgactataccggaaaagccatcaagtaaaaatcagaaatacttttcgtaagaaaataagctaaccacatcttaaccaatgtggttaggttaatacatattcttatagatagtatcatcggaaaagtgcaataaaatatatgggaggaataaaaagtgaaaaagaaaatcttaatacttgtaagcatattagtggtgtttctagctatacctccatttgtaaattattgggtgtcgacgccttcatctataggatttataccaatagaaaagcaggaagtttggattagtttctatgcctcattaataggtagtggaataacattgctaggtgttgctttgactatttgttataccgattttactaggaaagaagattttagaaagcatgaacaggaattaaaagaggaatatgaaaaaagaaataacgatacgaaaattaatctctctgcacagtataagcctattttgacagttacatttgattcgaattatatagatgatattaaatttgggatgtcaaaacgtccaaagttttatatagaaaatacattatcgttgaatggtaagatggaaattcaatttaataaaaaaagaattagtattagtttgtatgtcttgaatatagggagaggagaagctaataatataaaaattagttctttgattttggattccaaaggaagtacatgggatactgaattaaggacatataaggaaattgctacttctagtggaatatgtttaatgttttacaaggaactatcagagcgtgaatggaaggaatacagtaataaaatgctagaagaaccttttaaaatgtgtatagacattgaatatgatgatcttgttggctttcatcataagttgaatagtttattgatggtaaaacgatttgtacatataagagatgaggataataatgttattgaaaatgttttagttataaatccgtatgattctacgattcaaaatatgacaagtattgacagttagtattatggtgattgttaagtatatgacggaaaaccaagtgattgaatatatttataatggcattgtagagaacatagctcaagaatttgagagagaattgggcagtataatggcagtttttaattttgactatggcgacgaattttaaattagtgtatgtaagtttttaaggagatttctaccgctgaaatatggtatcggccgaggatttgtggtggataggcatggtaatacagcaggagatgatattattacctatgaccaagaattatacccgacactaagatttttgaattcggataatcaatttgcacagaaggaacagattccagttgaagttgtatatgcgtacatagaagctaagatagacgcttaaagagccttctgaaaaacgaatatttcagagttagtctcaacgaagtctcacgagatttgagactaagtgagactctatgatatagcaaaatgtgataaaacccggatttgcaggtgaattataaagtagtagtatcaagtcagtctcatttttgaaattgtttgttgagactaacataagactgaggaggttaaaaatcatggacataagtaaaaaagattggaagctatttcgagaaagattatcaggttggcaggaaaaatatatggaaggtcttgttaaagagtatgcaaattttctgaatgatgataaaaagcctgcatcagagaaattctgggaacttgaaaaacggataaaagaagataagcgtcatccgggtgttatcatggaactgaaaaaatcagaggtaatatgggatattgttcgtcttattagactgaaagtaattacatataatgatttatcagactttagtgatgaattacagaatgaagtaaaaagaatacttgagatgtatagataattacggaaaggaaggtatgaccaatgcgagatccaatagagaatgtgacgagattgcagaagcagctaaataatctgcaattggagaatcaggtattaaagaatatattggataaagcaggattgtcatatcaaaatgaactggcaagtataagggaaacggaaaagaaagaggattttgatccagaacagggtaaaaggattgtgcacccaaaagagattacagacaggatggcaaagctctttttctcattcttttggggaagaacagatgtatatgcgaaaagaaatgtaaataaaaacggagaggcggcatattatccgcagtgtgataatttctggtcagataattgccataggaaattaaatacacatatagactgtaaggattgcaaatattgttcgtatacaagattagatttatcaactatattgacgcatttgaggggaaactcttatgctgcaaaagatgtaatcggtgtatatccattatttagtgatggaacatgtaggtttctggtgtttgactttgataatcatgagaagaatgcagaaaaaaaggattttgcaaatacagatgatacatggattgaagaagtcgaagctatgagagatatctgcacgttaaatgggatagaacctttggtagaacgttctcgttcaggaaaaggtgcacatatatggatattctttcacaagccaatatcggcggcattggttcgtaaatttggctttgcacttttagataaaggtgcagagcaggtgaatttaaagtcattcaattattatgatagaatgttgccagcacaggattccttagaaaatgtggcaataggaaacctgattgcattgccattacagggaatggcgttgaaagatggtaatagtgcatttgtagatagtaactggaatgcttatcctgaccaatggaatgctttattaagtaaacctaagctttcagaagaatttctggagaataaaataagggaatggatatttacagcagatgaccttgaagcatccagtgatgaagaaaatagggaaaagccatgggatagaatgaaaaattttgcaaaatcagatgttgatgggaaaatggatatcacattatcaaatggtatatatgttgacagcacgaatcttaagcctgcgatgcagaataagattcgcagaatggcagcctttagtaacccagtattttataaaaatcgtgcgattggaacatctaattatgatacttcgaggtggatttatcttggaaaagaccatcttggtggatacatacagattccaagaggattacaggatgaattaatagcaaatattgataaggcaggaattgaatatactattgatgacaagaggcagcagggaagaaatattaatgtagaattcaatggagaactacgacctgaacagaacaaggcgttaaaggaactgactaagcatgataatggaatacttcatgctgcaacagcatttgggaaaacagttgtatgcagtgcagtaattgcagaaaagaaagtgaatactctgatcctgcttgaatcatctgcacttatagaacagtggaaagatgctttaaacaaatttttaattatagatgaagaactaccacagtacaaaacgaaaactggaagattaagaactaggaaaagtctgattggaatattgcagggagtacatgattcgatgactgggattgttgatattgcaatggtcggctcactttgcaaaaagggagagtttcataatttgctgaatgattatggacttgtgataattgacgagtgtcatcattctgcctctgaaacaatagcaaatgtgctaaaagaagtaaaagcaaggtatgtatatggtgtgacagcaactccgaaaagaggagatggactggaaaaaatcaattatatgctgataggacctataagatatagttacacagcaaaggaaaaggctatggagcaggggatacaacatcttgtatatccgcgttttaccagaactgttccaccaagaggtgtacttatcggtaagatgcatccaaatgaagcttatgagattattcataataatgatatcagagacgaacagattgttgaagatgtgaagaattgcgtatcagcaggtcgcaccccagttgttttatcacgatacaaggatcattcagagaaactgtacgagcgtttgaaagcttatgcagaaaatgtattcttaatgacaggtaacaactcaaagaaagaacataagaagattctggaacagatgcatcaggttgataaggcggagtctctgatattaatagctacaggttcactggtaggagaaggttttgattttccaagactggatacactttttatggcaacacctgtatcatttcgaggagttgttgaacagtatgctggtcgattgaatcgtgattatgctggtaaagaaaatgtaataatatatgattatgtagacaaccatattacaatgtttaataacatgtatatgaagagacttaaagcatataaacagattggatatgagattgcaggtggtttgcataatgataaacagacagctaatgcaatatatgacggtgataattatgctgaaaattatcataaagatttactggatgcaaataaaaatataattatttcaagccctgcaattagtgggacaaaagtttatgaacttattaacctgctaaaagaaaagcagttatcaggtgttcagattacgatagtaacatgggcaccggattcctatggatttggagatgcatcatactggatgcagctacatgaagaaatgcgcaaagctggtttctacattaaaacagtagaagagtcatgtgaacgatttgctgttatagatcaggaagttgtctggtatggaaatattaatcttttggcgaaggataaggttgatgacagtattatgagggttttgagtaaagagatagctagtgaattgatggaaattacatttggagataatggttgagctgaataggactaaaacatatggattccataagatgtaaagaagacgtttcatgagaatagagaaaggaatgcgtttatgagcaaaggattacagataagaaatagcactgttgatttcttggttttcacacgagatgcaggagaagacggaatagaagtcagggttcagaatggcgatgtatggcttacgcagaaggcaatttcacggctttttgatgtagatagaagtgtgattacaaaacatctgagcaatatttttaaagagggagaattagatgaaaattcagtttgtgcaaaatttgcacaaactgcggatgatgggaaaacatacaattataagttctattcattagcagctattattgctgtggggtatcgaattaattcagaacgggcaacgcagttcaggacatgggcaaccaaagtgttggatacatttacaaagcaggggtatgttcttgataaaagcagattgattaatggacagattttcgacgaagattattttgagcatcttattgctgagattcaggaaatcagagcaagtgagagaagattttaccagaaaatcacagatatatatgcaacagcagttgattatgataagaattcacaggtgacaagagagttttatgcaacagttcagaataagatgcattatgcagttcatggtaatacagcggcagaagtgatagtggcaagagctgatcataataaggaacatatgggacttaaatcatggaaaaatgcgcctgatggtaaaatagtaaaaacagatgtgtcaattgcaaaaaactacttggaaaaagaagaacttgcagaattaaatgagattgtgacaatgtatcttgattatgcaacaagacaggcacgaagacatattcctatgactatggaagattggaaaacaaagcttgacgcatttcttagatttaatgatgcggatgtacttcaggataaaggaaaagtaacagcagctattgcaaaggaatttgcagaaagtgagtttgagaagtacagagttatacaggattcactatatgaaagtgactttgataaattgatgaatgatatggaaaagaatgatagctgatatttatcacgttacaaaacagtgtccattaagatacaagaaagtatatttcgctggatgataagaatcagtatttgatcataggaagaaatccaaagaatttatttacaacaagtgataatttatttgagctcgtgagtgagaaaatgggggagcagaaagaatttagtctgaaagaatatttgtgagctatattagtattttccgtaacatggtatggctaacaggagtgtgggaagagattgattttgaaactgtaagcaatgtggcagttggtgaaattcagcaagtaattcaatagattattttatgcatgagatgaaaatgaataatgattatcagataaaagagcgatgtagtttatatacaccgctctttttgattggcagggtattttatttttctagcagcttgcgtgcatatgtaagtattctgccttctacattgctgtcctgcttgatcattttgatgagtgaataaagctcaggatcattggatgaagaaacaataatgtaatcaggatctgtcttatcagatgctccgtaaagataatctatgttgcaattaaatgtctgcgcaatgaaaccgactgtaggataagagggttcacgttgtccattttcatagcggccatataccattggcgagatgttaaggcgacgtgcggcctctgctttatttatatttagagtatttctgagttggattaatctttcaggttgaaatttcataggtaagctccttcttaaaaatcgatattcaagtgcttgaatgtaatcataaaagattataaattataattttgggtttttcaatgtttacgttgacaataaccattggatatgatattatttcaataaccaatggttacacatatggatgaatagaggggaataaaatgaaacattatattgagattcaaagactaaggacacaagacgtggtcgttgatgatacgttgacacttgaaaaaaacacggatgcatttatacagggagatataatcagtatcactgagaaaatagatggtgccaattcaagtatatattatgataaaaagctggatagactgagatgttttagcagtaaaaatgaacttgatttcagcaaccagttgagaggttttttgacttatgttcagagtctggatagggagccgtttattaaatatccgaattatatattttttggagagtggcttgtgagccatacggtcatttatgatgattccaattataacaaatggtatttatttagtgtgtatgatacagtttcaggcagatggctgtcacaggattttgttaaaaaatttgcagaaaaaaatgatttttgttatccgcatgaattatactatggaccatttattagctggaaccattgtctcagctttgccaatgccccagcatatggcacgcagcaagagggaatcgtcataaagaatcagactgcactggagcaggagagaggtccgcatatattaaaatatgtaaatccggagttcaaggaaacgcagaagaagaatcataaaaagaaacttgaagatccgaataaattgaacgaaaaagcagaggcagaagagtatatacgcatgattgtaacagatgcaagggttatgaagtgctatcataagcttgttgatgatggaattttaccggagaaatttgaattgaaacatatgaagcatgttgcacaaaatttaccaaaggctgtgtatgaggattgcgtgaaggaagaattggagattttaaagaaagccggtgagtttggaggcaaactttgcagtaaggtgacaatggaaattattaaagataaattgaagataggttgacttttttggctggaattgttaggatataaatgaaagtttaccactgaccgatatgtggtatataaatggtcgggttgaaaaagtcttttgccgtagtgcaagagactttttttgtggagattaacaaatgataaggaatggtttaataacgtttgttaacaatgcatattgtaaataaaaaatatcattattacaatagagattagaaatgcttcgaacaatatgaaaggcataaaactaatatgaaaagacacacaaacataattatcacagccgtggcatctctgcttatcgtcacacttgcgggcagagaattcattaaaaatcataagaaagagtctaatgataaatcgtctacgaatgtatcagaaaatacatgtgaagatatacctgacacaagtatatctgatacgtgtgtagctgatacgaatacacctgacacgaatacatctgaagcagatattctggatacgacctatgagaataataaagagcaattttatatatccgaaattccggatgatatttttgaaaaaatgcagggcaaatcatacaaggtagattgtacactccccagagaaaatctgcgatatatacatgtactacacgtgggctttgacaatcaggtgcatgaaggtgagctggttgtaaataaagatatcgcagatgatgtacttgaaatatttaaggagctctatgagtccggatatcaaatagaaaaagtcagacttgttgatgaatacgatgcagatgatgagtcatctatgagcgacaataattcatcggccttcaatttcagattcatctcccacactacaaagatatcgaagcatggaatgggaatggcggtggatatcaatactctatacaatccttatgtcaaaacagtcgatggggagctttcgattgagcctgcaaatgccgcagattatgttgaccggagcagggatttttcgcacaagattgatcatgatgatttatgctataagctgtttacggagcatggctttgagtggggaggcgattggacgcattccaaggattatcagcactttgaaaaatagtgctgataatttctacggaagtatatgacctgccgccaggtacagctcataccattcctcgcgagtcagagtaatattgcatgccgcgataatttccttcaggcggctttcgcttgaagttccggtaacaatctgcatatttgccggatggcgtaaaatccatgcggccgcaatagtagtatcgctgacattgtatttttcggctatcacatgaagtcttttattcagttccgggtattcgtcgcttccgagaaaacagcccttccatgccggcatctgaaacggagaccatgcctgaagagtaatgttgtggaggcggcagtagtcgagcagacttccgtcgtgatcaattgaaccggttgtttccatattgacttccatgccatttgcaacgagattggaaacaggaatgctgaactgaacctgattgacaacgagtggttggcggacatatttctgtagcagttcaatctgcatcggcttatggtttgaaacaccaaaatggcgaacctttccgctttcaaaaagaacatcaaatgcataggcaacctcttccggttctacgagtgcatccggacgatgaagcagcagaagatcaagataatctgtatgaagcctttttaaaataccatcgacggatttcagaatatgctcctttgagaaatcatagaagccttggcggatgccacattttgactgcagatacatatcttcacgctttagggatggatcgtctgcaaacgcttcgccgaatacgctctcactcataccgccaccgtagatatcagcgtgatcaaagaaatatgcgccctgttccagcgcagcatgaataaaatgattcatctcatcctttgatttttcagaaaggcgcatgcatccaactgcaactgaaggaacctttcgtatattattgcctaaaattgtttctctcatagtaaaaatctcctttgtaattattttctaattcccataatgagtgcggcgtagccccaatcccatatgagctctgcaaagctgttttccagatattcgcgtatgtcatcatcatcatatcctgtcatgcgtgagatgatgacaatatgctctctgatggtttcatatgtcaacggactattggcattgtgactgtaccacaagaaaagactttgacgtatagcagtgtattcaatcataatccactgcattttgataatcatgtgttcaataatctttttagtggatgctgcttcaggcgatatcaggtcggaaaacagctcgtttgccagataattgcgaaaaacaatgtcataatctgtgagcattgagcaaaattgtttctgcgatgtttgcaaggtgcggcttatggaattattgtctgactgtgaataaatattggagtatctacaagcctcggtcagtacaggctgaagaaaggctgtgtataaaccctctttacgataatttactgataaatcctgaagcagctcattgcattcgataaatgtatcttcgtccgggatatggatatcttccatggcggtattcagttcattaagcgtctggtcggaaaaatattcctgtatatgtgtattggtgacaggctggtttttatataattccaataaaatgtaaagcccatcaagcaaagccagctccactgaaagcccttggtcagatatcagtttaatcagattatcacggattaaaaatgccgtagataaattattccgggtctcggatattacaggaaatgtgacaggtttttcgcaccacaggtcgataactgccggacagcacggcatgagtgttcgttcctcatgtgttgaaaaccggtggatttctctgggaaacagtgcacatgtctctgaaagcacttcatctgagtatgtcattacaagatgacatagcttatcctttgaaagaaacggacaccgatgtttttcgtccagtttaataaccagactgccatccttatggcatgtgtatgagcttagattgtcactttttccagacactttatcagcagaaaaaggggctgcagataaagtatccggaggagaaagcttcttccatttgcggtttgtagcgtcatctactgcaattttccactcctgacagcatgtgatactgcatttgtcagcaatacatttgaaattgttgtaatagtccggttgatagtttttcatgtttttcctttacttatacagatttgtgaatagagcatagtatagcttgttattatcaatcaatcacatgatgattcagccattttcttgagtggaatctggcagtaaatataatagaacgaagcatccagtcacaagccatgccaatccacactgcaatcggaccaaagccccatacacggcagaggtatatgcacagacttacacggcaaagccacattgtgcagcaggatacaatcatggagaatttcacatcgcctgcggcacgcagtccatatggcgggatgaaggatggtacccagcagattggcttgacaattgtgataaaggtaaccatctcaaagcagagccttgcactggcatgttccattccggcaagcattgtaatgggctttgtgagtatgaaaataatcagacagctggcaatgattacaacctcagacaccagtgacagttttttgatatagtagacagcttcatcctttctgccggcacccagacactgtcctacaacagtcataagacctattcctattccgatagcggcaataccatttaagttttcgaggatattggtcatggcctgggcagcgatggccacggttccaagagtcgatacagtagactggatagccagctttccaaactggaacatgctgttttcgattcctgatgggataccgatgagcaggatttttttaatcaggccccattcagggcgtatagacatatagttctttatgaaaatcggttcattttcccttcgaagctgtatgataacgacaaccgcgcagaatattcgggatacgagagtggaaatagcagctccctcaacacccataccgaagccgaaaatcagaatagcgttgccgccgatattcataaagtttgaaataacagatatgaccataggattgcgactgttattctgtgcgcgcataatggatgcgccggcatcatagagccctataaaaggaaatgacagtaatgtaaaaaagaaataaacctgtgagttcctcattacatcagcttcaacagcgccaaatatggcacgaagcagcgactttcttgttatcagacaaaaagcagataaaagtacagacagaaatgccatgacaaaaaatacctgtcttgcagcatggcgggcaccttttgtattgtgacttcccagatactgtgaacagagaatcgcaccaccggcggcaagcgctgaaagtgcctgtatgacaaggatattgattgagtctacaagcgagaccgctgagatagcggcagaacctacattgctgaccatcattgtatccacagttcccataagagaggctaatagctgctctattattattggaaccaaaagctttcgaagtttagtatttgtataaatatgattggttgtagtatgcaggtttgctgtttttattttatctgaatgtaaatttgtcatatctgattacctttataactgtatattttacgtgtttaggttagtacgataaattcgtaatgtcaataagaaatatttaaagtgctggcaaagtgttagtaataaaattatttaaaatgtcagtaacttctattttttgaacaatattgcacaatccccttttattttgaaccaaaaagttatacaatagtaccatagtaaaaggcatcaaaactaattccaaaattaaatcacgagaggtatcaacatgaaaaaagcaaagaaaccacctctgtacaaaagcttcggctatgccttcgagggcatatttacatgcatcagaaatgaacgcaatatcaagattcactgcactgtcgcgatacttgtagtgatagcaggagcggtacttgggataacaccgactgagtggtgcatctgcctgacactgtttggactggtgatagccctggagctagtcaacactgcgattgagtcagttgtagatttggtaacgacagagcgaaagccgcttgccaagacagctaaggacacggcagcaggagcagtgcttgtggcagcaataatggctgcgatagttggacttatcatttttgtgccaaggattgcttctctattatgatgattaaaggtgtagtcagattacggcaatcaattttaaataacaggaaatggaggattttaccatggaaagacttacagacggattaaagaagattttacttgcaggaataggaacagtggcagtgactgctgagaaatcaaaggaagtgcttgatgagatggtcaagagaggtgagctgactgtcgagcagggcaaggtgctcaatcaggagcttaagcacaatattaaggacacagtaaagaaaaatgtaaatgtatctgttaagccacagtcaccggaggaactcgaggagcttttggacaagatgacacctgaacagatacaggctttaaagagcaagcttgcacagatggatgaggctgacgtggatcaagaagctgatgaaagcgttttcgaggatgaggacattgtaacagatacttcagccgatggaaaaagtgcttccggtggagaatcacagacagcggatataaaaatagaagctgaggacgataaagaggaaagtgtgaactagtatggatagccgcctgaaggagatgacagcggtactgaagaagtacaagctcacgcatggacttacacccgaaaaattcagacttatattgcaggagctgggacctacctatattaagcttgggcagataatgtcgcttcactcggatattctgccaaaggaatattgtgaggagcttatgaagctatgctcagatgtggagccgatgccgtttgagcaggtggaggctgtcatagatgcttcatttggctattcatggaaggatgtttttgcttcaatagataaaaagcctcttggggcagcttctatagcgcaggtgcacagggccacacttaaaaccggtgagcaggtggttgtgaaggtgcaaaggaagggcattcacgaggtgatgtcaaaggacatggcgctgcttcacaaggcggttaagcttgtgccacccatctctataaagggcattgtggattttgacatggtgcttgatgagatgtgggctgtggcacaggaggagatgaattttctgcttgaggcatccaatattgaggagtttgccggcaataacagggatgttgcatttgtagccacaccaaagctttaccgcaagtataccacatcacatgtgcttgtcatggagtatataaagggctttaatatcgatgataaggaggaacttttaaaggatggctatgatcttgaggagataggcagcaagctgattgacaactatatcaggcaggtgatagaggatggcttcttccatgcggacccgcatccgggcaatgtaaagataagggatggcaaaattgtctggattgatatgggcatgatgggaaggctttctgagcatgacaaaaaggaactgagcaatgctgtttacggtatcgccatgaacgatatcggtatgatagaggatgcggtgcttgcaattggtgactttaagggtgagcctgacagggcaaagttgtacaaggatatcaaaataatcataaataaatacggcagtctggatatgggacaggtagatgtcgcagagtttattcaggagcttttggaggtaatgaagaacaaccgcattgttatgccgcacggttttacaatgcttgcgaggggcatcactcagatagagggcgtgcttgcggatattgcacctggcatcaacatggttgggattgcttctgcaaggattaaacaggagatgcttaagaattttgatttgaagggcgagcttaaaaaagccgggaagacagcctacaaatcagctcaccgcatggcagaactgccggataggctggcgcagatactcgaggaatatcaaagagggcagacaagcataaattttgacatgcatgcttctgatgagcttgcgaggcttttacacagactggtgagaaatatcgtcatgggcttatgggttatggcacttctaatcagctcaagcatagtgtgtaccacagatatgacacctaagatacttggcataccggcgcttggtgtgatgggatatgtgtttgcatgcatcatagtgctttatacgattgtgaagcatttcatatccagacgatgataaaaaagcaggattctgaaattaatcagaaatcctgctttttaattacgttatattatttcgatgattttttactctttgcttttttataatcctcatcaagatgatatttgtcctgatacatggtgaactgacctacaaatgcaggctcctgtccggccttaagctcattgagataatcatgtgtctcgaatgatgagttgtgtgtctgaatcaggcatacagcaatgtttgagcagtgatccgaagctctctcacagtttgtgatgtaatctgtgaggaatacgccgagtctgctgtcacatttgcccttctgaagacgctcgatatgatgatttctaatctccttggtgagatcatcaataacctgctcaagaggctcaaccttgactgcctctgtcaaatcgtttttgctaaatgcctctacagtgagagtgagaatctcgcgcaacgcattattgagcaccgtgagctcttttcttgcgttctttgaaaactcaagcttgttgtcatcaatctgcttggcaagctttgccatatttatcgcatgatctccgattctctcgaagtcattgattgcatgaagcatctttgaaatctcgttgttgccgtcctcagaaacatcctttccggataagtgaatgaggaaggtgtcaagctgatcctctaagtaatcaagttgctcttccatgacttcaatatcatcaaactttgaatctgagtaattgtcaaagaggtctaaagcattcttgaagctgtctcttgcaagctcagccatctcgtttgtcttttcaagacattctttgacagcaagtccaggtgagagtaaaagtctctcgtcgagtacgacctgtccgtctgcgttgtcagttgtgacaagcttcttagcaatctttacaagagtattgctaaacggaagaaggataatagtggtagcgatgttgaagattgagtggaacaccgcaatcattacaggagtgatgctgtcattaaataatgtcagatcaacagcataacgtgcgatacagtatactacaagtcctattgctgtaccgaacagattgaagctgatgtggatgatggatactctcttggcgtttttgtttacgccgattgacgaaagcagtgcagtcacgcatgtaccgatgttctgacccatgatgatcgggatagccatgctatatgagatagcacctgtcatggctaaagcctgcagcacaccaactgatgcggcagatgactggatgactccggtaaatacagcacctacaagcactccgaggaatggattgttaaaggtggtgagcagtccggtaaattcaggcatatctgcgagtggtgatacagcgccgctcatgagctgcataccatacataagtacggcaaaacctgccatgatgattccaacgtccttgcgcttttccttcttgcttcccataatcataatcacaccgataagcgcgatgacaggggagaagttctcaggctttaacatcgagatgaacagattgtcactttcgatacctgaaagactaagaatccatgcggtgagagtggttccgatgttggaacccatgatgacaccaacagtctgggcaagctccatgatgccggagtttacgagtccgacaagcataacagtaagtgcggatgaggattggattgcaatagtgactattgctccaaaaaataagctcttgatagggtttgaggttacctccttaagtatcttttggagattgcctcctgcgagcttctcaagactgcctgacataacatgcattccgaaaaggaaaaaggcaagtccaccgcataactgcaatatagagtaaatgttcatgtttacctccgtttgtaaaaataatttgttttactatttgctccagttatacatatttagtttacacaaaacacatataacataacataatttttacattctatcaatataatctgaaattttaataaaaaaagtgatattcacttttgaacacttttgaaaacgttttaaaatttatgtatatttatgttttcttgtgtttacttttgaaggaaaacgttgtacaattacagtataataatttaaggtaattattcagaaatttacattacaaggtggaggtatattatgtcagacgtaaaaagtgttattgaaagcggcagggctgtgctcggaatagagttcggttctaccagaataaaggcggtgcttatcggggaggatcatgctcctatagccacaggtgcccatgattgggaaaacttgcttgtggacggcatctggacatacagcctggatatgatttgggagggcatttcagactgctacagcaaaatggcgcaggatgcaaaggaaaagtatggagttaccatcaaaaagcttgcggcaatcggtatttccggcatgatgcacggctatctgccttttgacaaggaggataatctgcttgtgccatttcggacatggagaaataccatcacaggtgaggctgcagcagagcttactgaggtgcttggctttaatattccgcagaggtggagcatagcgcatctgtatcaggctatattaaataaagaagagcatgtatcaaagatatcatatttcacaacattagcaggctatattcactggcagctcacaggtgaaaaggtcatgggtgtaggtgaggcatcaggcatgtttcctatcgattcgaagaccagggattatgatgcggcaatgcttgataaatttgcagcattagataaggtaaaagaatatccgtgggatataagagacattctgccaaaggtgcttacggctggagaaaaggcaggtacgctgacagaggaaggagctaaaaggcttgatgtaagcggcaatctggagagcggtatattgcttgcaccgcctgagggagacgcaggcacgggaatggtcgcaaccaattctgttgcagtgcgtaccggaaatgtatcagcgggcacatctgtatttgctatggtggtgcttgaaaaggcacttaaggcagttcatgaggagcttgatatggtcaccacaccatcgggagatgcggtagctatggtgcactgcaacaactgtacgtcagacttaaatgcatgggtgggattattcaaggaattttcagagctgtttggcatggatatagatatgaatgacatatatggaaagctctacaacaatgcacttacagccgataaggactgtggcggccttgtggcctttaaccttttctcgggagagcctgtcatcggactcaatgagggcagacctatgtttgccagaaagccggatgcaaggatgaatcttgcaaactttatgcgcacacatctctatgcaagtcttgcaacactaaaaatcggctgtgatattctctttaaagaggaaaaagtaaaggtagacacactttacggtcatggtggtctgttcaagacaaagggtgtgggccagagcatacttgcagcagccatggatgcaccggttgcggtcatggagacagccggagagggcggtccgtggggcatggcagtgctcgcagcttatatggtgaataaagcagatggagagcctttggaaaaatatctttcagacagggtatttaatggcgaaaagggcatagtaatgcagccggaccctgatgatgtaaagggctttgatgagtacataaatacatataaggcggcaattgaggcagagcgtgccatggtaaaggcgctcccgctgtaatagcagtaaaaaataataagagaggaacaaaaaatgcttgaagaattaaagaaacaggtttacgaagcaaacatggagctcccaagaagagggcttatcacatatacatggggcaatgtcagtggaattgacagggaaacaggctattttgtcatcaagccaagtggagtggattatgatgtgctcacccctgatgatatggtagtcatggatcttgaaggaaataagatagagggaaaatacaagccttcgtcagacactgcaacacacttagagctctacaaaaagtatccggatatcggaggaattgtacatacgcactcacctgaggcagttgcatgggcacaggccggcagggatattccgctctacggcaccactcacgcagactatttccttggctcaattccatgtgcgagaaatctcaccacagaggaaatcaacgaagcctatgagaaaaacacaggccttgtcatcatagagacctttgagaacagaaaaatcaatcctgtatacacaccggctgtgctctgtcagaatcacggaccgtttgcctggggaaaggatgcggctgaggctgtgcataacgccgttgtccttgaggaagtggcaaagatggccagactcacagagtcagtaaatcctgacgtgaagccggccccggacaacataaaggagaagcatttctaccgtaagcatggggctaacgcatactatggccagaactgatttgtagctgttatacggcccgcagtattcatattattttgtgtttacatagcacaaaaaatgtgataaatttttatgtaaagtacagtctcaaacgactgtaaataagacataaggtggttgatagaatggtactggcagttgagataatagtctgctgcttaatatttggcatatacagagtaataaggataaagcgggatccggcatataagataagcaatatgcccgagaagctgcagaaaaaggtcatgcatatgcgcggctacagaaatcggaatatccgtatcatgacagactgggagaagtttgtaaagaagcttccggcacttatattctggacgatagcgcttgtcatactgacatcaatagcaggggcaacaagcttttcaacgggctttgtgtttgcgcttttgatatggatggcagtcctattgtttcttgaactggtagtatactgtggctggtatgcacatacaccgaaggtgtggataaagggcaccgaggatatggcgaaaaagacatataccaattatgcacattatatcggactgataccacagagagctctgatggggatagttgttgcaatcatagttgggcttgtgatagacgtgattccaaggcttgacaatagtaattattcgccgaaatatacagagatagaggataccttaaaggcagcctgtgacaattacaggattccgggcatggctgttgaggtggtagatgcagagggcgtgcttttctcaggtacatatggggattgcaagagccttgacacaccgtttatcaccggttcactcagcaagtcatttactgcggcatgcatcatgaagctgtatgaggaaggacatctgaatattgacagcccggtaaatccttatctggatgcagctgaggtattcaaaaatccaaaggatgcgacaaggattacaataagacagctgctcaatcacaccagcggacttggcgtgtaccagcatgtgggaaatgcaaagattgttggcaaaaatggagaatatacctatgcgaatgtcaattatgacatacttgggcttatagtggaaaaagtatcaggtgttagctacagcgattatctgacagagacattttttacaccacttggcatgactcacagcagtgcatcctatgcaaaagcgaagaaggatggtctgattacaggtcacaacaattatttcggtttttcggtggaaagcgatgtgaagtatccgctcagcgattcgtggtccactgtaccggcgggctatattgcatccagcgcaaatgatatgggaaaatatctgcagatgtatctgcgtggcggctatggaatactctctgacaagagccttagcacaatgtttcgggtaacagttcctatggatgagtcaggtgagacaggctatggtatgggctgggtacgttcggataaatatgtcgagacagtgtacaatcacacaggtctcacggaaaactatatctcagacatgtatctgcttccggagagtggcgtgggtgttgtattcctcgcaaataccaatgactatatggtcacaaacaatctgatgaacaaggtaacctcaaaggttgtgatgacacttatgggatatgcaacagacgagcttgacccaaaggattatgttgatgcgcacttgttctatgaccttgtttttgcagcatttatattggttgcgctgatggagattatcaagtcgcacaaatggagaacagacaatagcggaaacctgatagcgaatatttttctgcatctgtttttgccggtgggcatagttattgcgcctattgtcggaggtataccatactgggtaataaaggactatgttcctgatttatttattgtttcatgcctgagtgtagtacttcttgcaataggtggaatcctgaagcttaaaaacaggagaaattcataagataaaagcagaagaaatagaaatgcggctactgtaatatgtagccgcataattttttgaccacagcatcgtgggaggagtcacagcacactccgacagtacatgaagagtataagccggaggctttgacaaattcattgtcatctgctgaaagcctgataccacaaggatattccttaccatctattgtcacatatgcaagcctgtccttatatttttcaaggacggctttatccagatatttgcttatatcctcaaagcagacatttttggcgtaataatcaaaggtcttatcatccataaagcatatatcgtattcgttagaagcaaagtatgctgtgaggactgtcatgttctgatagtctaggccgcttttgtctacatcgacacagatatttttgtttaaggcaatttcatcctttgacaaatcatagccgttatctgtgagaaagtcattgaaaatatcggcgccgttgtcctctgtggtgctgttttctgcatttacgcataatacgctcaaaacagtatttttctgcgcaagccggccgcaaataaaggttgtgactgctatgattccgataatgacaagaaatatcggtattttgtaatagtcccatatatattgtattttctgactgaatgtcagctccttaaaaggtgtcttttgttccatgattttatctccctctgatatgatgtgctgtagtttaaaaatattataaggtaatttatagaaatttaccaataaacattctattaactgcctttttctttttagattattatgctataatgagccaaaacacagataatacaaaaggagaataatatgaaagcgagccacagaaaagatgttataatcgccagactgatttttgcagcaatatgtctttttcttattgccctgattgctacaatagtgattaccattacctcaaagggcggcaaaaaaaaggaacaggacaaggtacaacagaatgcagttagcgaaagtgaaactgacagtgccggcgatagtggtacagagataggcgccatatatctgccacagcagactacagagggtaccgaaaaaacttacgtcactactacaagcagtgtaaacatgagagagaagcctgataaaaacgcaaatatagttactgttataggacagaatgtgaagcttgagtttgtatcagaggacaatggatggacacaggttatcttccagggacagacaggctatgtcagctctgactacgtcaagtcagatatggctgacagcactacagacagcggcacatcaggtgcggcaaatagcggggctgccagtcagggtacgcagatggcagtacaacaggagctgcagatagtgctgcacagtcacagtaatagatacgtggtgaggtaatgtatatgacaggaattatatgggcatgtgctgcaacatttattgcagcatgtgtgcctattttggccaaggttggaactaaaaagacagacccggcgctggcgggaagcattgccgggattgttttatgtgcgtctatatttttttacaggaaagataatataatgggaagcagcctgattgcactcggccaaaggagcgttatatttatacttctggcagggcttgcaacagggctttttggcatctgtttttttaaatccatacatgagggctacacatttcaggttacagctatagttaaatgcagctatataatcacgcttgcagtgggattttttctgtttcataacactcctgacacttttgactatatagcgattgcactcatgattgctggaacggttattttaaatctggatggaaccggtattttgtttgcgcttcttgctgcagtttgtgcgtcggcagcatatattctggtgtcacttggcgggatacagccggataagggctttattgcgttctggtgtgtatttataggaacgctggtgcttattatatttactattgcgacaggaggcatgaagaaaatcagatccatgtcatttgttgatggtatatgcctgattcttgcaggcattgcatacccgttagcatatgatttttatggcagggcagtttcaatgtccggcagctatgcagggtatatttttaatttgacgattattgtgatgatgatatgctccagcgtgatactgaaggagaaggtatcgggaaagaaattcctgggcgcatgcatttttattgcagcattgtttgttatagcatgcaactaatagctgaatatagcatataatgattaaaaagaggttttttgatgttacctttttataaaacatttccgtttatggattactataaaaatgaggaggcatttgcaaaggacctggggatgataaaggatatgtatccgcttgatacggcgatgatacagtccgcagtagagcagcgcatggatgagctggagtatgagggcagctttatctatgatgaggtgcctgacagacagcgtcttttcgatgaggcagacaggattgccggcagatttatctcagagcaaagcagcaggtgctttatctgtacaatagcgggcatactttttaactgtgaactctgcagacgcagatgcagatacagaaggtaccaaagattctggtagatataaggatatgattttatgagtaagaaagtgataaagccgatagtacttatagtagtatttattgcagcattaattacattttgcataactacaaacaagggaaataaggatatgaccacgaagcaggcggatgcaacgctgccggttatgtcatttaatctggataaaataaagataaacaccctccatggatatactactgagatggatccgacaaagatgcgcgattgcgttattccgatttcggatgacaggaagctctcattatccatttcaacatatggtatggctgttgacagaatatcatataagatcagaagcatggatggcaagaggctggtggccgatgacgagatatcttctttttctaataaggataatactattcaggcggacgtaaacatgccgaatgttatggatgaaaatactgagtatcttttggtgtttaccatcacaagcggtcaggataatgtatattattacagcaggattatgcagaccgatggaaaggcagctgcaaaggttgttgagtttgcaaagaagtttcatgatgagacgtttataaaggatgacaaatcattctttacaacatacatggagacaacaaccggtgacagaaatacgcttgcatatgtggatctgacatctacggtgagtcagattacctggggctcaatggccgctgcacagtatacgaatcctgtcatagccctaaaggaaataaacgattcttatgatgtggttacaatagactatgtgatgagctgtgtggacggtaagggtgagactgagtattacaatgtgagagagtatttcaggctgcgccagacggaaagccgtatgtacgtgctcaactatgagagaacggcaaatcagatttttaacagtgaaaacagctttatatcggattcaggcagcgtaatgcttggtatcagaagcagtgaggcagagtacagggctaatgaagcaggcagtgtgatatgctttgtccaggagggagatttatactcctatgatatcaacaatggaatgataatcaaggtattcagcttcagggacgctgagggcattgatgagcgtgaaaactggaatcatcacgatataaagattgtcagtgtagacgaagcgggcagtattgattttgtagtatacggatatatgaacagaggcacccacgagggagaggtgggaaccggtgtgtaccattatgacggtctggcacatactatagatgaggaagcgtttattccttctaagacatcatatgaggtgctaaaggctgagatgggcaagatgctttatcttaatgagaagaatgaattctatctcatgatggatgacagtctatataggattaatttaggttcgatgtcagtaaagaaggtggttgagggcttgtctacaggctcttactgcgcatcggagagtaacagatactttgcatgggtggattctgcaaatcagtactcatcaaataccataaaagtaatggatttaaagagtggcaagacctttgaggtcaaaaagggcgacgaccagtatctacgtccgcttggcttcataggtgaggatttcatatatggacaggcgaatgctgctgatgtggtctctgatgcagccggaaacacgacatttcctatgaatggccttattattcttgatacatctgaccagtcggagcttaagacatataccccttcgggcggctatgtcgagaaaatttctgtggatggatatacggtaacgatagatctgattgcgcaaaacaatggtgtgtatgcagaaatcggtcaggataccattatgaaccgggaggctgattcgaagcagaagatagctcttgatacgagccagtccgatacaaagctgacggtcagcgctattagtatagcaggtggtaaaaagccggataagctgaagcagctgacagcacagatgactataaattcgcatgatactgctgttgatttaaagtttgatgacaatacagtccatttctatgtttatgcaaagggggatgtgatttttgcatctgataacatctcggatgccataaaacaggcaaatgacagtatgggagtggtaattgactcaaaccagcagtatgtatggatgagggcaagaaaaaatgcagtaaatgcatttgcgaatattgcatgtaatgaaatcgataaggatgctgacagtgtcgtgaagtcagtaagtgcaatgcttacctacaatgatgttacggtaagtgtgtctgagctgattggagcaggcagcagtgctgttgatgtgctcaaaaacaacctgccggacaaggaaatcctggatttacagggagtgtcttctgaggatattatcttttatatcagccagggcaatccggtatttgcgatgacgggaaatacgtcggcagtgcttgtgacaggatactcttcaaatggagctttatatatttataatccggataatggcgcaacaacatcgatgagctatgaggatgctgacagaatgttttataatggtggcttgcattttatcacgtacatgacaaaataaacagaataatgttgtaataatgccgattttgtgacataaaatgtaagctccttaggtaaagtttaacagaaattttcataaggattgaaaagcggttacaattgggatatattaaataagtatgaaacaggtttaatactttttgtttaaggagaacgtatgagtaagaagagtattgtcgttacaaaagtatgtgaaggtcatgataatccaatcgcagagcttgttcaagtggcatgcaagttcgatagtgagattacattggagagtgacaatcgcaaaatcaatgcaaaaagcatcatgggtattatggcatttaatccttcagatggaatgtctgttgatattgttacaaagggtgatgatgagcaggaagctttagttgcaattgaaaattttttagtatgtgaataatgagcatgaggaggaaaatagtatgcgtaaaaagaataactcaaagacagttaagcaggcagtaaagccggttgaagttaaaaaagaggaaacagtggcacagccggtttcagagcctaaggctgatgcaaaagccgatgtaaaggctgaggtagaaaaagccgtagagaagacaaccgagaaggttgagaaggctgttgaaaagacaactgagaaggttgctgagaaggccgctgaggttaaggacactgttaagaagacaacagcaaaggcagcaaaagctgcaaagacagctaaagaggcaaaacctgcaaagaaggagccggtaaagccggagattattgttcagtaccagaacagcgaggttgatacagcagctgtcgaggagcgtgttaaggctcagttcgttgctgagggacacaaggcaggcttcatcagaaagcttaacatctacatcaagccggaagagtattctgcatactatgttataaatgataagttttcaggtcgtgtagatttattctagtcagacattattagggaatacatattttatctagcgcataataaaagccgatacatttcgtggagacacggtgtatcggcttttgttttgtgtataagtatgtgtaaaagcagctgtatgacagtttaaatgcataaatacttagtggacaaacaaaaaagggtaacaaaaaagcgggtgatgggaatcgaacccacgtatccagcttggaaggctggtgttctaccattgaactacacccgcataggaatatttaatttgttgtataatgcccagttccggaatcgaaccagagacacacggattttcagtccgttgctctaccaactgagctaactgggcttgcctcacaacaaaaattattctacacgatttgtcttttgatgtcaatattaaaattgagaaaatttggatagttacaataaataaggaatgtagtattaaaaactatataaaatagaaaatgatataattttatcttgacatgaataccttaaaggactactatgtatatatgtttgattatcaaataatttgaatatcaaacataaaaatgaaatttatacatgttcggaggtacatattatgttgagagaactgagaatcggagatatggttgcaaagcttcctatcattcagggaggcatgggagttggagtgagtcttagcagactggccggagctgttgctaaggagggtggtgtaggagtgatttccaccgcgcagattggctttgaggagccggagtttgaaaaggaccaggcaaaggctaatctgattgctatcaagaagcatattaagaaagcaaaggagcttgcctgtggacatggaatggtaggagtcaatatcatggtggctttaaagcattacaaggagcatgttctggctgcggttgaagcaggtgctgatgttattataagcggggcaggacttccaatggaactgcctgagctggtcgatgaaaagtcacatacaaggattgctccgattgtttcttcaaagagagcagcaaatctgattcttaaaatgtgggcacacagatacaaccgcacagcggactttattgttatcgagggaccaaaggccggaggacatctgggattttccaatgaacagcttgcagatatggagcatatggattatgacagcgagattaaggagattatcagctgtgcaaaggcatatgaggagaagtttaaaaagcacattccggtaattgtagcaggcggagtgtttacacatgaggatgtcatgcactgcatggagcttggagccgacggagtgcaggtggcgagccgttttgtggcgacagaggagtgtgacgcatctgatgcctataagcatgcttatctgaacgcgaatgagtctgatgtgcagattatacaaagcccggtcggaatgccggggcgtgctgtcagaaatgagtttatcaggggtttggaaaagaaaaagcagcctatcacaaagtgctacaattgtcttgagaaatgtaaccctgcaacagtgccgtactgtattacgaaggcactgattgcagcggttaaaggagatatgcaaaacggtctggtattctgcggtgccaatgtgggccgcataaaccggatgactacggtccacgagcttatgagtgagcttgtgggagcataggcagtacatcctcacagtagcagcgaagcacttcacctacactccatgcctgcgcatagcagccacggccggtgtgaggggcatcgccgtcaaatatctcgcatattgagccgatacagttgttgagcagatgctcccttacagggtcaagcagcttgtcagcgcataaagcggtcgccttcgtacggccgtttacctttacataagcactgataaaaccaccgagcagaaagccccaggctgttccctgatgataggcatggtcgcgctttgagagagagccgatgtaaatcggatggtaatccttgtggtcaggatcgagcgaacgcagtccgcagcctacgtacagcttatccattaccgtatccacaattgctttttcacgctccatgtcaggcatggtaaatggcaggcttacggcataaatctggtttggacggattgtatcgtcatcctcgtcaaccacatcatacaggcagcctgtgttttcattccagaagcgcttgttgaaggaagcctttacgagagaagcaagctgtctgtagctgtcatcgttatcgccaaacttagcctgaagcatatccatggtgcacagtgcgttgtaccaaagtgcatttatctcgacaggcttgccgtgacgaggcgtagcaacccagtcaccgacacgaacatccatccatgttacctggtcgagtccgcttccggcatgaatgagcccgtccgtgtccatatatatggaaaaatcagtgccttttttataagtagatatgatatcctttaagcatggataaatatccttctttataaattcataggcatcgggagtggacacatattcaagatatttgtagacagcataaaaataccacagtgatgcatctacagtattgtagagaggctcaagtccgctgtccgggaacatattcgggatgagcccgtccttacagtacttggcaaaggtcagtagtatatcgtgagctttttcaaaacggccggtgcaaagtgtcaggccagtgtatgaaatcatagtgtcacggccccagtctgtaaaccaaggaagtccggcgagcacagtgtcatagcctgttgactgtctgtgtgcgatgaactggtttgcagccacagtaagcttcacggcaaagtcatcagtgaagccgcttcttttaatcagctcatcggtgtagtcaagctgcgcatgtagtatttcaaaagcactttcgttatcagaaacaaggtgtttggcgaaggctgaacctgcgttgccgttacaggcttcaagtggtacgatatcgcacattacagaaaaatgcattgattcaccggcaggaatatccacgctcacgtcatatgggcaaaatgcacagtcgaggccaggcacttcattgtccacctcggtctgagcctcaaggtcacagatatatttgtcgtctctttcagtaagctccccgcctgaaaaagcaatgcggatacagtggtcatcatgagcttttgggatgagactaaagccatgctcctgcttttggacctcgaattttaatgaatcgacggtggaactttcagagtgctcacggaagttcataagaggcgtgataaaaagcttagacgcttcgcctttgttttgaatctcatatgccacggcagcgagattttttccctgtgccagtgcgatgtgtttttttatggtgatatcaccggcctcatatgtaaagcatatggttccatcgtatgtgaactctcttatatattggatgccgtctgtgtggcatccgcccttgaactggtcacttgagagatcataggtgtggctgtctgtgactattttttcgtttgtctttgagaagcagacatatctttgcacaggagagcggagacttgcaatcagatagccctgatgcgtacggtttatcgcaccggtgactgaaccgccggcatatccgccaaggccgttggttaaagcccactcccttcttatgttgtttttgaaatcattttgcagttttaagttaaattgcatcttaaccctccgaaatttcactaaatttttataatattttaacctataaccatgaaaaaatctatacgaaacggcaaaaatctgttatcattataaagatatatattttcaatatgcaaaggagaattataatggaagtatttacattgattgcgcgtaaaaaaaatgtggcgctggtatttgtttcgtacctgcttgtggctcttgctgcgataagtcttctgactatctgcatcggctttgcaccgggtattttatttgcagtagtatttggacttattgcatatcttatgataatggcacagaacaccgagtttgaatattcatattttgacggagagctgcgctttgccaaaattaaaaacaagagccgcagaaagcgccttggaatatacagcatggagtctgtagcagcaatcgcaccggcaggtgacagaagtgtatacaattacgagaatggaaatgagatcaagaaaatagactatacctcaggtcagaaggatgtaccttattatgatatcgtcatcaaatcgcctgatgagaacgtacttataaaggcggagcttgatgacaagttcctcacagaggttgagaaaaaatacagatcaaaggttaaaagaagagaggagtaattactcctctccttccaaatggtacattttggattttgttttgccggcatcgtatccggttgagtatcctttgttgccgtttaacagtctcagacatttgggacaaagagtgccgaaggtaacaggtgcaccgcaccgctggcagtgaagaccggctatagtggaggctgattcagactgcttgtactcgatgcgtccgtcctttatccagctctttacctgtctaagcggtatcttaaaatgttctgcaacctcgtattcatttacgtcgtgggtacggataaattcctttacctcgcggaataatgccagatcaaggcatcgtgggcagagattctctttatagtcatgtggcagaggccttttacagttttcacatacttttgtgttgttgttaaaaagacttttaggattatccataggtgcctccttaagcttgttttattcattatatcataacagattttataaagaaagtagggacttttataatgtcaattgcagttttcgattcaggagtcggcggaataagcgtcttaaagagcctggttgaagtgatgcctaacgaagattttatatattacggtgattcagcaaatgcgccttatggtaccaaaacacttgagcaggtgcgagctttgacctgtgagcatgcaaaggagctgattttaaatcagcatgcaaaggggcttgttgtcgcgtgcaatacagccaccagcgcggcagtgcgtatattaagagaacaatatcccgatgttcctatcgtagggatagagcctgcagtcaagcctgcgatgctttttatggaaaatccgagagtgcttgtgatggctacacctatgactatcagggaggaaaaacttaaaaagcttatggacagatacagacatttgggtgagattattccattgccttgtcctgggcttatgaatttcgttgagagaggtgacttgtacggtgatgatgtgagacagtatctcgaggaacttttgtattcatattcgcatggtgagatagatgcggttgtgctgggatgcacacattatccgtttgtcagaaaaatgatacaggaggtgcttggagatagggtgcgtgtgttcgatggaggaaacggtacagcgcgtgagatgaaaagacgtctcgcagaaaaaggtctgctgacagacagcaccgctgcaggtattgtggattttcaaaacagcctgaccggacagagccatgaggataaaatacagctctgtaaggaactttttaacaaaaaaatttagttgttatttacagaatattacaaatctaaaaaaagtataaaataatcacgacttttttaataaaatatttctaaaatgtacattgttaggacataattaccacatatacttgttattgtaagaggaacaaaaccttttacattattccctttttattaataaacattttcataactaaactcctcgagaaaggatcgcgttgttaccgcgtgtaacatcgcggtcctttctcacgttttgcatgcaggctgcggagccgcagccttactgttttagttatgcacaacgcttccacatatatcgttcagcacacacatgtcacagtgcggtgtggttcgggcagtgcatacggcgcgtccatgatcaaccagcctgtggcagaagtcattgctctcctcgggtgggatgattttccaaagctccatctccacttttttcggatcctttattccatctacaagtcctatacggttgcaaaggcgtatgcagtgtgtgtcggtgacgatggcaggcttgccgtacacatcacccataatcaggttggcactctttctgccgactcccggcagcttcagcaggtcggtcatattgtcaggcacaagaccgccaaaatcatcgcgaagcattctcatgcaggcacttatatcacgtgccttactctttcccaggccgcatggacgtacaatttcttctatgtcggaaacatcagcatcggcgagagcctcgatggaaggatattttttgaacaaatccaccacgactacatttacgcgggcatcagtgcactgggctgcgagcctgactgatacgaggagcttccaggcctcgtcgtactcaagagtgcaatcggtgcgaggatatgcggtttttagtctttttattacttcaatggctaatttttcttttgtcatatgatcctccttatatttgttttgtaactattcagtaactttattttatagtatacaaaaatgcgcggagattgtaaaatggatttacgtggagcggattacgtgagaggaacggtatgaaactggaaaatatgaataacgcatatgcaaataaaaaatgtacaaataacatatatataaacaacagatatgcaatagaagtaactaggaaaagaataaaaaacatgtatcttcgtgtgaaggacacggatggcacactatcagtgagtgctccttatggcatgagtgatgcggaaatcaggaaattcgtggagagcaaatcagactggattgagcaaaccacacgggaaatgcttgttgcaagacagcttaaggaacaggagcctgttttagcacctttcatggagagagagatgcgcagggagcttaagatgcagctgcagaggtttatcgacaaatgggagccggttatgggagttaagtcagccggctttacgataaagaagatgaagacaaggtggggatcatgcaacgttaagtcacatcatctgaatttcaaccttctgctggctaaggtgccgtcggagtgcgcagagtatgtggtggttcacgagcttacacatctgcttgagccaagccataatgccaggttctggtcgctgatggaatattatctgccggaaagcaaaaagctgcgtaaacaactagctggcttttctgcgcaggatatgatatgatattgttaaagactcacttagagaaaggaagcttcaaatggaattttgggatatatacgataaggataaaaaaccgacaggccgtacaatgaaaaaaaacgactggatacttaaggatggagagtatcatctttcagtgcttggcgtgattcacagacctgatggcaggttccttatcacacagcgtgtcatgacaaaggcatgggcaccgggctggtgggaggtttcaggaggagccgcacaggcaggtgagagctcatttaccgcagtctgcagagaggtgaaagaagaggtgggccttgatgtatcacagtgtccgggagggcttgcctatacctatcacagagagaatccgggcgagggtgacaactatttcgtggatgtttaccgctttgagcttgatttcaaggagtctgacgtacagattcagacagaggaggcacttgggtttaaaattgccacactcgatgaaataaaagagcttgctgcgcagggagtgttcctgcactatgacagcataaagcaggtatttgaaagttaattgctatgattatgataataagataacatagaattataagattacatagaattataaggagcagattatggcattaccaaaggatccggttatgctgcttagctttgtaaacacacagcttcgggacaattattcaggattgaaggagcttgcggcagcatatgatattgatgagaaagagctttgcgacaagcttgcacagattgattacaaatatgacgagactgtcaatcagtttaagtagattttcagcatacatattaaaagtgatggaaggataagataatggagacatgctgcgatttttgtgcatacaatgaatatgatgaggatgatgaggaatattattgctcggtaaatatggacgaggatgatatggcgagatttgtccagagcagctataagcgctgtccgttttaccgctcaggcgatgaatacagggttgtccgtcaccagatgtgaagcattataacaaaatataataaatataattaaaaaataaattgcattaatcaatttaaggctgtataataagttggttattttaaaaattaagaatttacaaatatacaaagcatattgataaggaggaaaattatgcctgtaaaatacgtgttcgtcaccggtggagttgtttccggtcttggaaaaggaattaccgcagcgtctcttggacgtcttttaaaagctcgtggatacaaggtgacaatgcagaagttcgatccatacattaatattgatccgggtaccatgaaccctattcagcacggagaggtgtttgtaacagacgatggagctgagacagatcttgacctgggacactatgagcgttttattgatgagagcctgacaaagaactcaaacgtcaccacaggaaaggtatactggtcagtattacagaaggaacgtcgtggtgactacggcggaggaacagtacaggttatccctcatatcaccaatgagataaagagcagattctacagggatttcacatctgaggataccacaatcgcaatcatcgaggtgggtggtacagtcggcgatatcgagagtcagccgttcctcgaggcaatcagacagttccagcatgaggtgggacacgacaatgccatcctgtgccatgtgacactgattccatacatcaaggcgtcaggagagctcaagacaaagcctacacaggctagcgtaaaggagcttcagggcatgggaatccagccggatatcattgtatgccgttcagagcatgagcttgatcagaagcttaaggacaagattgcgctgttttgtaatgtaccgaattcacacgtattacagaaccttgatgtggagtatctctatgaggcaccacttgccatggagcaggagaatcttgcaaaggttgcatgcgagtgcttgaatctcgactgtcctgagccggatcttgcagactggaagcagatggttgaggatctccgtcatcctgataaagaggtcaagatcgcacttgtcggaaaatatacagcacttcacgatgcatacatttcagttgttgaggcactgaagcatggcggtatccctgagcatactacagttgatataaagtgggttgactcagaggagcttaatgatgacaatgcagcagaggtattcaagggtattcagggaattatcgttccgggaggctttggagaccgtggtgttgagggcatgattgcagcagctaagtatgccagggaaaacaatatcccatatctgggactctgccttggaatgcaggtggcaatcatcgagtatgcgcgccacgtatgtatgttccatgatgcacacagtatagagcttgatccaaacactactcatccggttatcgcacttatgcctgaccagaacggaatagaggatatcggaggtacacttagacttggttcttatccatgtgtactcgacaagacatcaaaggcataccaggtatatggcacagagaatataagcgagcgtcatcgtcaccgttatgaggtcaacaatgactacagaacagctctcacagagcatggcatgaagctttgcggtacatcaccggatggcagaatcgtggagatgattgagattccggagcatccgtggtttattgctacacaggcacatcctgagcttaagtcacgtccgaaccgtccacatccgcttttccatggcttcatagaggcggcaaacaaggtgaacagataatttttcgttatatttaatacaatatttagaaagtgcggttgattttgaccgcactttttcttataataaagtgaagcttcacactttatatattgtgaggagacggtttcatatacaatatattccttggaaaataagaagtctgtaatgatatttttcggggatagggtttcatgggaatgactataaaaattacaggtcaaaattgccttgaagcttgtaataaataagaaaagaacggagaaaatatggataatcagggacctaataactataattacaacaatggccagggcaataatgggtccggtggaaacggaaataacggtggtaacagacctggtggaaacggtggcagaaacaaccgtggcggacagggtatcatggcatttatcctgctgacactcgtggcattgtttgtgtatgcacttatatcaaacagcatatcgcatgccagcacacaggaaaagtcatacagtgatttcataaaacagctcgacaagggtaatgtcaagagtgtggagtttgattcctacgagatagactacaagcttgtggatgacggacacaaggattatgacatcacatattacacaggccgtgtggctgatgatgagcttgtgccgacactcaaaaaagcaaagacctcagagggcaagtctattgagataaaggcagcgatacctgataatacatctacatggatttttaatatattaagttttatagttccgcttattttactgtgggtgcttttagcatttgtttcaaagaagatgggcggcagcatggggatgggagtcggcaaatcgactgccaaggtatatgtggagaagtccacaggcgtcaacttcaaggatgttgcgggacaggatgaagccaaggaatctctccaggaggttgttgatttccttcacaatcctaagagatatacagatatcggagccaagcttcctaagggtgcgcttcttgtgggacctccgggaacaggtaagacactccttgccaaggcagtagcaggagaggcaggagtaccgtttttctcacttgcaggttcagattttgtggagatgtttgtcggagtcggagcttcgagagtgcgtgatttgttcaaggaagcacaaaagatggcaccatgtattatctttatcgatgagatagatgcaataggaaagagccgtgacagcagatacggcggtggcaatgacgagcgtgagcagacactaaaccagctccttgcagagatggatggctttgatacatcaaagggattacttatattagcagcaactaaccgccctgaggtgcttgataaggcacttcttcgtccgggacgttttgacagaagaatcattgttgacaagcctgacttaaaggggcgtctggagaccttaaaggtacactcaaaggatgtcaagatggatgagtcggtagacctcgatgcactggcacttgcaacagcaggacttgttggctcagatcttgccaacatgattaatgaggctgccatcaatgcagtcaaaaacggcagacagcttgtaaaccagtcagatctctttgaggccttcgagcttgttgcagtcggtggcaaggaaaagaaggatcgtgtcatgagcgataaagagagaaaaatcgtctcataccatgaggttggacacgcacttgtatcagccctgcagaaaaatacagagcctgtacagaaaattacaatcgtaccacgtaccatgggagcactcggatatacactccagacacctgaagaggagaaataccttgagacaaaggatgaacttctcgccaaaatcacaacatatatggcaggtcgtgcagcagaggtgctggtatttaactcagtcacaagcggagccgcaaatgatatagaaaatgccacaaagatagcccgtgccatggtaacaatgtacggaatgtcagataaattcggcatgatgtgccttgcaacagtacaaaaccagtacttagagggcggagcaggattaatctgcggagagaatacagcatcgcagatagatgatgaggtactctcaatcataaacagcagctacgcagaggctatgaagctcctcgatgaaaacagagaaatcctcgacagtatatcagattatctctaccagaaggaaacaatcacaggtaaggaattcatgaagatgttccgcgatatgaagggactccctgacccggacgaggagaacaaagagcaggaggccgcacagaatgatgatgcacagaaagatgtgacatcggcaacagatccactcctccgtaacgccatagacaagcctgcagatacaaatgaatcttccggatatacagcgccggatgatacatcaaataattagtaccttatagggcaattttcgcgcagcgaaagagcgtaaaaaagagtgcagtagaaaagagtttcgcacacataaactgaaaaaagccggagggtacacagtgtgttcagaaggaaaatatgaactgccgcgggcttccgggcaagaaaagggacgaaaaagccttgcaaacaaagaaaaccaaacggagagaaatcccgcggctgacttcatattttcctgaggaatacactgtgtgccatgccggcaaccacacaacctaaaagtgcgaaactccaccacaaccaacccaaagagcgaatatggaaaaaacatttgatatcaaagaagaattaaaaaaactcccggatgccccgggagtttatattatgcatgacaaggatgatgtaatcatatatatcggcaaagccaaaagcctgacgaagagagtacatcagtactttcaggcgagccacaatgagggcatcaagaaaaaacagatggtagagcatatagatcattttgagtatatagtcaccgactctgaacttgaggcccttgttttggagtgcaacctgataaaggagcatacaccaaagtacaatactatgcttcgtgatgacaagacatatccgtacatcaaggtgacactgggagaggactatccgagggtgctgttttcgcgtcagatgaaaaaggacaaatcccgttactttggtccgtatacgagtgcctctgcggtgaaaagctcgatagatctgataaacaaaatctataagcttcgcacctgcaaccgcaggctgccgcgtgacataggagcagaccggccgtgcctcaactatcatatacaccagtgcagtgcaccatgccaggggtatgtgacgaaggaagagtatgccatagcggtaaagggcgcgatagatttcttaaacggcgactatgagcagacaataaaggctcttagcgataaaatgctaaaggcctcagagagcatggagtttgagaaggcggctgaatacagggatctgataaacagtgtgaagcaggtagcacagaagcagaagataacaaatgccgacggcgaggataaggatatcatagcactggcaaatgatgatacggatgcagtggtgcaggtatttttcataagaaacggaaagcttataggcagagaccatttccatgtgagggttggaagcgaggaggctgcggatgatgtgttaaataactttgtgaagcagttttattccggaactccgtttataccgcgcgaggtcatgctgcagagcgagatagaggatatggctgttttggagcagtggctcagcgaaaagcgaggcaggcgggtgaatataaaggtgccgcagaagggcatgaaggaaaagcttgttgagcttgcctacaagaacgcactcttagtgctcagccaagataaggagcggataaagagagaagaagggcgcacaataggagctgtaaaggaaatcgagggacttttgggcttacacggcttaaaccgtatggaggcctatgatatttccaatatcaacggctttgagaccgtcggctccatgatagtgtatgagaagggcaagcctaaaaagagcgattacagaaagtttaagcttcgcacagttacgggacctgatgattatgcgtcaatgcacgaggtgctcacacgccgctttacacatggcatggaagaacagaagcagcttgaaaaagatggctctccacaggaaataggcagcttcaaccgttttccggatattataatgatggatggtggaagaggtcaggtaaatatatgccttcaggtgctttccgagctggggctcgacatacctgtgtgtggcatggtgaaggatgatttccaccgcacaagaggtctttattacaacaatgtggagatacctatcgaccgccacggcgaaggcttcaagctcatcacgagaatacaggatgaggcacaccgctttgcaatagagtttcataggtcactgcgctcaaagagtcaggtacattcggtgcttgatgatattgaaggcatagggccggcgcgcagaaaggcgctcatgcgccgctaccagtcgttagagaagataaaggaagcagatgtcgaagaccttatgcagacagagaccatgaacgagaaagcagcacaggcagtgtatgcatttttccactctgccacgtagattttgaagctaatctgtggtatactaaaaaaacaaatatacatcaagggggaccgcgaatggatgcattacactcagtatcagttgcaaaggtagcagaattgctcgatctcaacaatctcacaaaagagatgaacctaaaggagagggcgatagagtgctcggacgtcaacagaccggcgcttcagctctcaggatattttgatcattttgaggagagacgaatacagattatcggaaatgtagagtatacttatatagagaagatgagcaacagcgagaaaaaagagcgctatagccgcttcatggagtttgatataccatgtatcatcttctgcagagatttacagccggatgagatatttatggaagaggccagagagcacggtattccggtgctgtcaacaggtcgttctacatcaagctttatggctgagctcatctattgtcttggtgagcagctcgcaccatgcatcacagtgcacggtgtgctggtagatgtatacggcgagggagtaatgatcacaggcgagagcggtataggaaagagtgaggccgcactcgagctcatcagacgaggccatcgtcttgtgacggatgatgtggtggaaatcagaaagatcaacgagcatacgctcatgggcacttcgcctgagattaccagacactttatagagcttcgaggcatcggaatcatcgatgtcaagacactttacggagtagagtgtgtaaaggaaaaacagcagatagacctcgtaatcaagctcgaggactggaagaaggaggcagattacgacagactcggcctcgaggaagaatatgccgagtatctcggcaacaaggtagtgtgtcattcactgccaatcagaccgggacgtaatctggcagtcatcgtagagacagcagcagtcaatcacagacaaaaaaagatgggctacaatgcagctcaggagctgtatcgccgcgtccaggcaaatcttacaaaaaattcggaggtataataatcatggcaatagaaaagaaaaacgcctgggagaaatatccccagggacctgaaagagaaaaattatttgcatttgcagaggattacagaaggtttatatccggctgcaagacagagcgcgagtgcacggcagcagtttatgctgacgccacaggacacggctttgtggaccttgatgagctcatcgagacaggaaagagcgtaaaggcaggagataaaatcatagcaaacaatatgggaaagggactggcactgtttatcgtgggcagtaagcctcttgagaagggtatgaatatccttggagcccatattgattcacctagaatggacttaaagcaggtgcctttatacgaggacacagacatggcacttttagacacacattattatggcggcatcaagaaataccagtgggttacactgccgcttgcacttcacggagtcatctgcaaaaaggatggcagcacagtgacagtcaatatcggagacaagccaaatgatccagtagtgggtgtgagcgatctgcttattcacctgtcaggcgagcagatgggcaagaaggcttcagaggtcataaagggcgagagccttgatgtgctcattggaagcataccgggaccagaaaaggacgaggacgacaaggatatcaaggagagagtaaaggccaatatcctcacaatactttcacaggagtacggtgtggacgaggatgatttcctttcagcagagatagaggtggtacctgccggagaggcaagagactacggacttgacagaagtatgatcatgggttacggccacgacgacagagtgtgcgcatatccttcatacagagctatgcttgagatagagggcacaccggaatatacaagtatatgcctgcttgtggacaaagaggaaatcggctcagtgggagccagcggcatgcagtcacgctttttcgaaaactgtgtggcagaggtgatgaacctggcaggagactatagcgagcttgcagtcagacgtgcactgaaaaactcaaaggtactctcatcagacgtatcagcagcctttgatccgaactatccatcggttatggaaaagaagaactcggcatacttcggaaagggtctcgtattcaacaaatatacaggcgccagaggcaaatcaggctcaaacgatgccaacgcagagtatgttgcaaggattagaaatatcatggatacagcagatgtttcattccagacagcagagcttggaaaggtagacgagggaggcggcggaacaatcgcatatatcctcgcaaactatgacatgaatgttattgacagcggtgtgccggttctcaacatgcatgcgccatgggaaatcatcagcaaggtcgatttatatgaggcattcagaggctacattgcatttttgaaggaagcataggctaaaggaatataagatgaatcagacatttgtaaaaagtgtaacagaacaattgccgcagcttggtctcctgcaggatgagccgatgaaaaaacacacgaccttccgcataggaggcccggcagattactatgcagagcctgatatgagccggatttcaaagcttatagagatggctaaggcatgtgatatgccggttacagtgataggaaacggaagcaatctgctggtaggagataagggcatcagaggtcttgtaattggtattggaaaaggcctgtccgaaatcgaggtgacagaagctgtggcgcagcaaagcacagcgcaggacctcacagcacaagacaacggtcatatcatcacagcgggcgccggggctatccttgcagcagtggctgcaaaggcagcggaggcatcgctttcaggtcttgagtttgcatcgggcatcccgggaagtgttggaggcgcggtagtcatgaacgcaggagcctacggcggagagataaaggatgtcctaatcgatgccacagtgcttactgcagagggcgagctaaagactgtcacaagggatgagcttgacttatcctacaggcacagtatagtccaggaaaagggctatatagtgctgtcagccagattcaggctcacaccaaagcctaaggatgagataaagtcatatatggcagagcttcgcgcaaagagagtggagaagcagccgcttgagtacccaagtgcaggcagcacctttaagagaccggagggctattttgcagggaagcttatcatggatgcaggccttcgaggttacagcgttggagatgcacaggtgtctcagaagcactgcggctttgtagtcaataagggcgaagccactgcagcggatgtcctgacactcataaaagacgtgcaggaaacagttttaaagcagtttggagtaaagctcgaaccggaagttaagatgattggagaattctagtgaaatttgtaatagtgacgggcatgtcaggtgccggaaaaagcacagcaatgaaaatgatggaggatatgggatatttttgtatagacaatctgcctatacagctattagataagctcatagacttttcaaataccttccacagtgatgtgtccaaggtggcagtcggcatagatgtgcgaaacggttcaggaattgatgcgattccacagacgctcgagcagctaaggcagaaaaattttccgtatgagatacttttcctcgatgctgaggatgaggtgcttgtaaagcgatacaaggagacgaggcgaaaccatcctctcgcaggcagtgagcgcatcaataagggcatcgtgcttgagagggaaaagctgcagtatttaaaggacaatgctgactatatcatagacacaagccagcttctcacaagggagcttaaaattgagctggaaaagatatttgtgcagaatgaggattacaaaaatctgtttatcacgatactgtccttcggcttcaagtatggcataccgtcagactctgatatagtcatggatgtgaggtttctgccaaatccctactatgtggacggactacgcgcgaaaaccggcaatgataaggagatacaggactatgtcatgcagtttccggaggcaaatgagtttatcgacaagcttgatgatatgataaagtttctcattccaaactatatctctgagggtaaaaaccagcttgttatatctataggctgcaccggaggcaagcaccgctcggtaacgcttgcaaacgagctgtacaagaggcttagcggctgtaatgactatggacttaagatagagcatcgcgacataggaaaggatgcattgagaggtaaataacatgtcattttccagtgatgtaaaggaagagctggcaaagcaggtatcaaagagcaggcactgtcagctcgctgagcttgcaggcatcatagagctttcgggccgtattaatgaaaaaacaaagggacttgagctcgacaccgaaaacctgctgcttttaaataaatatgccacacttatgaagcgcgcctttggcacagataccacaaaggcgctggatgagcaggataccggaaaaatacttgcagcgcttaaaatcacggcacagcctgtcaacagacagaccgcagacggactgcttcttatgcagacatgctgcaagagagcctttatcaggggagccttcatggcagcaggctcgataagcgaccccaacaaagcgtaccattttgagatagtgtgtcatacgaaagagcaggcaaagcagcttcaggagctcttgtgcggctttgatacggatgccaagatagtagagcgcaaggggcactatgtagtgtacataaaggagggcgcccacatcgtggacagtctcaacatcatggaggcgtatgtgtcactcatgaagctggaaaatgtgcgcatattaaaggaaatgcgcaacagtgtaaaccgtaaagtaaactgcgaaaccgcaaacatcagcaagactgtgaatgcggcagtaaagcagatagaggatatcagactgatacagaaaatgagaggactcgatgatttaccggcgcagcttcgggagatggcgctgcttcggcttgaatatccggatgcaccgctaaaggagctcggaggatatctggatccgccaatgggcaaatcgggagtcaaccacaggcttagaaaattatcggcgattgcggaggaactgagatagatgaagaaaaagcttttatttgtatttaatcccaaatcaggcaagggactcataaaggagcacctggtaaatatcgtggacatcatgacaaaggccggatacaaaatcaccatttatcctacacagtgtcagggagatgccataaaaaaggtcaggaaaaatgctgagaagtatgaccttgtagtgtgtagcggcggagacggcacactcgacgaggtagtgaccggcatggagcaaagcgaggtaaatgtaccgataggatacatccctgcgggcagcaccaatgactttgcaaactctctcggcatacccaaaaatatggaggaggccgcaagagttgccgtaaacggtactccattcccgtgtgatgtgggaggtttcaacggagataccttcgtatatgttgcagcctttggcctttttacagaggtatcctaccagacctcgcagcagatgaaaaatatactgggacatgccgcatatattttagagggtgcaaagcacctgatggatatcacctcgtacaggatgaaggtgagccatgacggtgagataatagaggatgagtttatatatggaatggtgaccaactccctttcggtaggaggcttcaagggcatatcaggtcctgacgtactgcttgatgacggcctttttgaggtgacactcatcaagaatccaaaaaacccaatcgagctcaacaagatacttgcgggactggcaaaccgtgaaaatgacaatgagctcatctactccttcaagaccagagagctgcatgtggagagtgaggaggaggtaccgtggacactcgacggagaatttggcggcagccacacggatctgaccatcactaatctgaacaaacagattaccattatgtgctgataaatacaaaatcgggcataaaatagtaatagtacacaattttttgtctgattgtgttaaaaatttaactttatttttataaggttatgtaatataataacattagcttttaattaacaggaggaaaaaatatgttagtatctgcaacagaaatgcttaagaaagcaaaagaaggacattacgcagtaggtcagttcaacatcaacaaccttgagtggacaaaatcagtacttttaacagcagaggagcttaagagccctgtaatccttggtgtatctgagggtgccggaaagtacatgacaggcttcggtacagtagcagcaatggttaaggctatgcatgacgagctcggtatcacagtacctgtagcacttcaccttgatcacggcacatacgaaggatgctacaagtgcatcaaggccggcttcacatcaatcatgttcgacggatctcattatccaatcgatgagaacgttgcaaagacaaaagagttagtagcagttgctcatgcaatgggaatgtctatcgaggctgaagttggttcaatcggtggcgaggaagacggagttgttggaatgggcgagtgcgctgatcctgacgagtgcaagagagttgctgatcttggtgtagatatgcttgcagcaggaatcggaaacatccacggaaaatatcctgcaaactggcagggactcagctttgagactcttgacgctatccagcagaagactggtgttatgccattagtacttcacggtggtacaggaatcccggctgacatgattaagaaagcaatcgaccttggagtatctaagatcaacgttaacacagagtgccagctttcattcgcagatgcaacacgtaaatacatcgaggccggaaaggatcttgagggcaagggatttgaccctcgtaagcttcttgctccaggtgctgaggcaatcaaggcaacagttaaggagaagatggagcttttcggatcagttggaaaggctgaataatattattgcaatttagtatttttgcacatactactttacaaaatatttatatcttgtagtaaaattttataaaacttaatttttttaatgcaaacacttgatttttgatactcaaaggagtatcttaatttcagaaataatgttaagcgaaatgaacgagggcgttccaccatagatggagtgccctcttttttaataaactaagaagtccggcataaaacaagaatattcgagtttatatgttgtgcagctgtttaaacattatttgaaaataacaattcactcaaggggattgatgaacagaaaggatgtaagatatgagcgaacaggaatatttcaacgtagcagacatctttggagagaacgtatttaacgatgcagttatgcaggagcgtcttccaaagaaggtttacaagaagctccatgaggttatggacgaaggaaaggagcttgatctcgagactgctgatgttatcgcacacgagatgaaggaatgggccattgagaagggtgcaacacactatacacattggttccagccacttacaggcgttactgctgagaagcatgattcatttatcacttctccaatgccaaacggaaaagtacttatgagcttttcaggaaaagagttaataaagggtgagccggatgcttcatctttcccatcaggtggtcttcgtgctacatttgaggcaagaggatatacagcctgggattgtacatcacctgcatttgtaagacaggatgcagcaggcgcaacactttgcattccaacagccttctgttcatatacaggcgaggctcttgatcagaagacacctcttcttagatcaatggaagcaatcaacgatcaggcactgagacttcttagattattcggaaatacaacatcaaagaaggttacaccttctgtcggacctgagcaggagtacttcatcgtagaccgtgagaagtatttacagagaaaggatcttatcttcacaggacgtacacttttcggagctatgcctccaaagggacaggagatggatgatcattatttcggagctatccgtgagagaattgcagcttacatgagagatgtaaacaaggagctctggaagcttggtgtttcagccaagacacagcacaacgaggtagcacctgcacagcacgagcttgcacctatctatgctgagtgcaacgtagctgttgaccacaaccagctcatcatggagacacttaagaaggtggcaggccgtcacggactccagtgcttacttcatgagaagccattcgcaggagttaacggttcaggaaagcatgacaactggtcaatcacaacagatgatggtatcaacatgcttgagcctggcaagacaccacatgacaatgtacagttcttacttgtactcacatgtatgttaaaggcaatcgacgagcatgcagcacttcttcgtgcggcagcagcagatgtaggaaacgatcacagacttggagctaacgaggcaccacctgcaatcctttctatctaccttggagaccagcttggagacgtattgaaccagcttatcgcaacaggtacagctacacacagcttaaagggtgagaagcttgagacaggtgttaagacaattcctgatttcatgaaggatgctacagaccgtaaccgtacatcaccattcgcattcacaggaaacaagtttgagttccgtatggttggttcacaggattctgttgcacaggccaacatcgtgctcaacacaatcgtggctgaggcattctcagacgcttgtgatatacttgagaaggcagacaactttgacctcgctgtacatgatctcatcaaggattacgcagtagagcaccagagaatcgtattcaacggaaacggatactcagatgagtgggtagctgaggcagagagacgtggacttccaaacatcaagtctatggtagatgcaattcctgcatacgttgctcctgagtcagttgcagcattcgagaagttcggtgtatttacaaagacagagcttgagagccgtgcagagatcgagtatgagacatatgcaaagactattaatatagaagcaaaggctatgattgatattgccggaaagcagattattcctgcagttatcaagtatgttacatcacttgcacagtcagttaactcagttaagagtgcagttgctgatgcagatgtatctgttcagtcagagcttcttatagagagctcagctcttctctcagatgcacaggttgcacttgcaaagcttaaggatgagacagcgaaggccggtgctatggaagagggcagagagcaggctgtttactacagagatgttgtaaagactgctatggatgctcttcgtactccggttgatgagcttgagatgattgtcgacaaagagatgtggccaatgccatcatatggcgatttaatcttcgaggtttaatccttgtagtttcaggaccaaagcttacggaaagctgtttagagcggcatatatgatttaatttaacataataataaaatggagacattttgctgaaccacgaagctgtggaaattggtgaagtgtctctgtttttttataaattttactttcaataaaatgaaaaaaatgaaagagaggacattactatgacagaagagattagtggagtaattttcggagtctggttccttattggagcagcattggtattctggatgcaggcaggttttgctatggtagaagcaggttttaccagagcaaagaataccggtaacatccttatgaaaaacctcatggatttctgtattggtacagttgtattcatactgattggtttttcacttttattaggtgaagatgttcttggtttcatcggtaaaccgggatttgacatctttacatcttacaaagattttgactggtcaaactttgtattcaacctggttttctgtgcgacaacggcaactatcgtatcaggagctatggctgagagaacaaaatttatttcctactgtgtttattcaggagttatttcagcacttatttacccaatcgaggctcactggatctggggcggtggctggctttcacagattggcttccatgatttcgcaggttcatgtgccatccacatggttggtggtatcagtgctcttgtaggagctacaattcttggacctcgtatcggaaagtttacaaaggataaaaacggaaagattacaaaggtaaacgctattccgggacataacatcacaatcggtgcactcggtgtgttcattctctggcttggctggtatggattcaacggtgcagcagcaaaatcagtagagcagcttggttctatttttgtaacaacaacaatcgcacctgcacttgcaacagtagtttgtatgattttcacatggctcaaatatggcaagcctgatgtgtcaatgtgtctgaatgcttcacttgcaggacttgtagctatcacagcaggctgtgatgtaacagatgcactcggtgctatcattatcggttccgtagcaggacttcttgtctgcttcggtgtatggttccttgacaatgtacttcgtgttgatgaccctgtaggtgctgtcgcagtacatatgatgaatggtatctggggaacaatcgctgttggtctttttgccacaaacagtgctccgggatattcaattgctgattcaaagggtaacgagctcgtaggacttttctacggcggtggatttaagcttttaggactccagctcacaggatttgtttctgttgcagcatggacagtagttactattacaatcgtattccttgttatcaaggctacactgggacttagagtttcagaggaagaggaaatcatcggacttgacccaacagagcatggtcttccatcagcatacgcaggatttgctatcatggatgtatcaggtgatgttatggatgtcaatgaaaatacagaccttggttcttcagagtatgcaacagcttctaaggcaaagaaggatgcagcagtgcctgttgtaaatgcaacaacaccggcttcagcaagcggtatccacaaggttgttattatttcaaagcttacaaagtacgacaagcttcgtaaggctatgaatgacttaggtgtaacaggaatgacagtgacacaggttatgggctgcggtatccagaagggtgccggcgagaaataccgtggagctgagcttgatgcgacattacttccaaaggttaaggttgaggtaatcgttggcaagattccggtagaaaaggttattgagactgctaagaagactctctacaccggacatatcggagatggcaagatcttcgtttacgacgtggcacaggttgtcaaggttcgtacaggcgaggaaggaattgaggcattacaggatgtagagtaatgcaaattattatctaatccccttagcatatatacatcaacaaaaacccccgaggatatgatccttgggggttttgctttagataattaagttgtgaattgtaatggttaacgatgagtgctaccggtcactgttaccggatgaaccggagctgccagtatcagtaccacctgaaccggagtcaccagtaccagcacctgagccagcaccggtaccagttccggcttcacctgtctgtgctccagccgcagtgccgtcagtactgcccggtgtagtaccggaattggtaggatccgtggtggttggtgagctgttgatcagcgatgttgcatcatgtaatgtacatacggtattcatgaacgtatcatctgccatgaattcatactcagggctgcctgatacagcgcctgttataaatacctttgatgttttattcggacaatacggaccggcaatggctcccgaatcggcacaaatttcaagtgcaacatgatggtcgcagttgtctgtcggcacagtgtccgtatcaaaatattcggttgtcagcattgatccacgaggatcattgtcacatattccatctagaggaacaagccctgatttgctgcataccgtggtatttgttataccatccggttgtacaaagtctttggtttcaagtccttcatggattctgctcatggcattcctccatatattcttagggtaggacgtgagcttgccggactgttttgagttgtcatcatagccgccccatacgacacatgtgtagtatggtgtgtagcctgcccacaggcagtcgcggttgctggttgtggtaccggatttacccgcctgggctatctggctgtcaaagcgcgccagctttccggttccctgtgtcagaacatccttcatggcatctgtaagaagccatgccgtagtatccttgattacagtacgtgtgttctgcgtattggtcttgtcaagtaatacattgccatcgtggtcaagaacctgagtgtagaactttggctctaagtatactccgccgttggctatagtagcatatgcacctgtgagctcaaggtttgtgacaccctttgtcagtccgccgagcgccagtgacaggtttttgtcggaatcggtgagagttgaaataccgaaatcctccgcatatttgtaaccgagctcaaccccgatatcctgtaaggttttgactgttacaatattgatggactttgttattgcccatcggatggaggtaaagcctccgaaagatttgtcatagttgttaaaggtttttgaacctactgtaaacggtgcatcatcctgcacggatgcaagtgttttgccgcctgcatcgagagcagcagcatagcagccgattatcttgaaggtagagccgggctgtctgcatgtatctgtagctctgttccatgttctgttgccggatttgtcaccgcgaccgccgaccagtgcctttacttcaccggtgctctggtcgatgactgtcatggcaacttgtggttccagcgtgatattgacagcttcagaaccctccacaattgaatcgccctcctcaagtacatcctgcttgtactgtgcaatagctgcattgcattcatcagggcttgagtagttgatgccgaaatcatcattgttgtttttcttcttataaaaagagagcatggtctggttcgtgtaggtcttgtacgaaccgtctgccttttttacttcgaaggaaagctggaacgaatactttgcgtcggacggatagttggatggattgtttgcctcctcgtcgcatatggtctgcatagtaaggtcctgtgtcgatttgatggtcagtccgccctgataaatcagcttgtaggcttctgtctcagagtaaccggcggctgtgagatcgtcgaacacgttgtcgatgagtgcatcaataaagtacgtgttcacagagtctgagcctgcggtgttgtactcagcaattcttgagtagacatcatcggccatggcctcatcatattgggccttggtgatatagccctgatccttcatgttatttaacaccttttcacgtctcttggcatttttgtcagggtgagtgatagggttgtagccggatggattctgagtgatacctgcgatgacagatgcttcggaaagcgtgagctctgagacatccttgttaaagtacttcttggatgcggcctgcacaccgagggtatttgcccccagattgaccgaattcatgtagttttcaagaatccagtccttgtcttttacctgcttttcaagctcaagggcaaggtactgctcctgaatctttctctgaagcttttctacaaaggaagtttcgcttgtccagctggtcagtacgttgttcttgatgagctgctgtgttattgtgctggctccctcgctgaatctgccctttgacagaccggagataaaggctcttccgataccatgcaggtcaatgccgttgtggtcgtaaaagcgttcatcctcgattgcaacaaaagcatgctgcaaatccaggggaatctcatcgatggtgacatactgcctgtttgccccctgacctacgagtgtggcggtttcttctccgtttgccgccagaacggtagttgagtagccggtaggagtgacatcgatctttgatatgtcaggtgcggaatcaatgattcccttcatgacaccgattcctgaactgatgccggctgcgcctgctacaattactacaaccagaagaatctttagaacaatgagcttgaccttatttttgaccttagagctcttattgtcatatttccggagcagctgcattgtagcttttttgccgtaattcatatataggcctccttgtcattataaagatttgtaatcttgtttgtatatactgtgattagaaaataaacagtatatattattatatcaaatatagcatttaaatgcaatttacagattggttttcatattatataatataagtaacaattacagctcaataaagtgtctttaagatgcatgagtgtaatcaggcaatatcaggatggaaagaatatcatatgtcagagaatactataagcctgtacgtgtacaagggcggacagggtgagataacagagaagaaatcgaggtttatagcgaccgtaaggcctgtagagtctgaggatgaggctgtaagcttcatcaatgagacgaaaaagaaatactgggatgcaaggcacaactgcagtgcctttgttataggaaagagacaggagctgaccagatgctcggatgacggggagcctgcaggcaccgcaggccgtcctatgcttgatgtgctccttaaggaaaatatccataatgccgctgttgtagtaacgaggtacttcggtggggtgctgcttggcacaggcggactggtgcgtgcgtatcagcaagccacaaaggcggggctttcggcaagtgagataatagagaagaaggatggtgcagtactgtttatcaggacggactataccggaatcggaagactccagtatctgtttgcacaggagaagattacggcgatggacacagcgtatgaggcggatgtgctcgtgaaagccgttatcccggaaaatgataaaaagcgcatagagaaaacaatcatagagcagacaaacggcacggcaaagcttgagtggggcgatgaggtgacatttgctgaatatgatggcgaggtattgctgtttaaaaattagctggtgctcacattttagcaggacaagcagaatttatattcaattacatttaattaaaataaaaaaatgcttgacactatatagccacatgtgtataatatcttttgttgagacaacacattggcccatcgccaaatggtaaggcaacggactctgactccgtcatttcaaggttcgaatccttgtgggccagctaaagagaacttcgatagaagttctctttttttcttgtgtaataatgcgatttgttataaaataaaaacgtatatgacttaaacagttatagaaggatggtgtgatatgaacaagaattttttaagaattattaatcttatagaagaactcggctctgaaaaaaagacaccaattactatacagcaataccaggatatcattaataaaagctcaaatctttggatgtccaatggtgtggatgaagcgtttagatttatcagaagttacttcaattttatagactagaggaattagatatggctttttcatttgacagcagaatacgttacagcgaggtggattcgtcatgcagactgagccttacggggcttaccaattattttcaggactgtagtgtgtttcactcacagtcacatgatgtgggaatcagatttcttgcggacaatcatatagcatgggtgctttcatcatggcagatatgcataaacaggcttccactgcttaatgaacaggtaaagatatccacatgggcatatggtatgaaggcgttttacggttacagaaatttcacgcttgaagatacaggcggcagcacactggcatatgccaattctgtctgggtgcttgttgatacacaaaccggcagaccggtgaaggtgcctcaggagtttgcggatacatacggtcttgagccgcagcttaagatggagtgtgcaaagcgcaagcttcatattcctgatgatatggagaaaaagggtgagattgtggttcctcagttttttatagacagcaaccatcatatgaataatgagaagtatgttatgctggcgcagcagcttctgccgaatgattttgaaatatctgagcttcgtgtggagtacagaaaagaagcaaagcttggtgatacagttatatcatacgtgaagtacacatcaaagagtgtgacagtggtgcttgcggatacggataaaaaaccgtattcggtggtggagtttttgagtaagccgataccgggaaaataattataattccattatttaacaacgatacagttttgatacagaaaggacggaaaaacatgagattaggagaatatcaggagcttgtatgtgtaaagaaggttgattttggcatatatctgtcaacatcttcggcttcggaggagagggtactgcttccggcaaagcagattccggatggagtaaagcagggggataagcttaaggtctttgtatacaaggactctaacgacagacttattgctacgacaaacgagccaaagctgacacttggaggtttatcagtgcttactgtcaaggaggtgactaaaataggggcgttccttgactgggggcttgaaaaggacctgtttcttccttacaaggagatggtcagaaaggtcagcgccggagatgagatacttgttacattatacatagataaaagccagaggctttgcgctaccacaaagggtatttaccatatgctgagcaccgattcgccatacaaaaaggacgatatggtttcaggccgtgtgtatgattttagcgacaatttcggtacatttatcgctgtggatgacaaatattcagccaagataccggtttttgagaatgccgcttatctgaagcttggagatgtgatagaggcaaaggtcactgatgttaaggcggatggcaagctggacctgacaatgagggaaaaggcatatattcagatggattccgactctgaaaagctccttgagctgcttgattcatacgcaggagtgcttccattttcggaaaaggcaagcccggaggtaatcaagagagaaacaggacttagcaaaaatgcattcaagcgtgcagttggtcatttgtataaggaaagaaagattgatctcacagatggcaaaatccgtcttaagaaataacagtctttttaataaattttaacaggaaagaagggcaataacatgaaaaacgttatcagtacagacaaggcaccggcagcaatcggaccatattcacaggctatcgaggtaaatggtatggtatatacttccggagtgataccggtagttccggagaccggtgagattcctgagggctcacaggcacaggcaaagcaggcatttacaaatctgtcacatctgcttgaggcagcaggaacaagcatggacaatgtggtaaagactacagttttcatcaaggagatgaatgacttcggtgcaataaatgaggtatatgccacattttttaacggagcataccctgcaagaagctgtgttgaggttgcaaggcttccaaaggatgtaatgcttgaggttgaggctattgctgtaaaataaaattattacataagtatttcgtgtgacataagtcctgttcgttggaaaaagtcaagattttcttaagaattcactaagaaaacgttgacatatatatgttgctttgttataatgacaaagtaatatttgtaacaaattcgtaataactgttacaaattcatacaacggagggtaaaatgaaagtaaattatgtgaaactcacagccggagtgcttacaggttttatggctctgtcctcagtgccatatgcagtatatgcggctggacctactgcaggagtagctagttatacatcagatattgttagtacatcaaacactcttacagcgggtgttacatctatgttgacagatgtaatgttaaaaggtgatgatacatcagagactgcaacagatgttgcggcaacagatgccgagccggttaaatcagcatatgctgatacagcggttgcacaggttagcgacagcgttaatatacgtgcgagtgcagatgaaaacagcgagtctcttggaaagctctataacaatggaattggaacagtacttgagacaaccgataacggatggtacaaaatccagtccggttcagtaacaggatatgtaaaaggcgattatgttgtagttggtgacgatgcactcgtacagagcgcaggacgtcgcgtggcaacagtcaatactgagacactcaaggttagaacaacagcatctactgatgcagaagtacttggtctcgtgtccggagaggatgatctcacagttgtggatgagtcaacagacggatgggtaggtgtatctacagcagacggtaccggatatgtatctacagattatgtgacactcgatacagagttcacttatgctgagtctaaggaagaggaagcagcaagacttgccaaggaagaggcagaacgtaaggcagctgaggaagcagctagaaaggctgaagaggcagctagaaaggctgaggaggcaaaagcagccaaggcagcagcaaagaagtcttctaagtcttcaagcaaatcatcaagcagttcttcatcagagaagagctatagcgcaccaagtggttcaaacggacaggctgttgttaattatgcatcacagttcgttggcaatccttatgtttacggtggctcaagtcttacaaacggaacagattgttcaggatttgtaatgtcagtttatgcacagtttggcatcagcttaccacacagctcatcagcaatgagaagtgttggatacggtgtgagcacaagcgatatgcagcctggagatatcatctgctatagcggacatgttgctatctactgtggtggaaacactattgtacatgcaagcaacccatcagacggtatcaaatatacatcaccggctaactacaaatcaatcattgcagttagaagaattttctaataaattcatgccggataggtaaatatgaatctataaagaccttcatctcatcgagatggaggtcttttttacatatagaaactttatttttgtttatgatatttgaaataagtggcctgtatgatatacatatatgcttaaaaacgggactaatttaaacagaatggaaaactgggctgtcaagcgtaatttttatcacatatatcaaaatagcaacatgcacaaaaaagtggatatgctgaacccggtaaattcggattggggataaatgtggataactatcaacaaaagtaaacctcaaagtgccttaaaaatgagttatgcacggagttatgcacattatccacatttttgaatgtgagcaaaagaacaactgttttgtaaagttctgataaagttgcactaaattagtaatatttcggaaataatattgacattttaattgtaaataatagtattaaaatactttataattgtcggacaacttgaaaagtgttgattatgtaagttaattttgttatacttcaaattatgattaaaaagatagatattgcagggctacaacttgataactatacagtacgcgagatgatcatgagagtcgacaggcgtatttcagagaagatactcactacaatagaggaagtgaatatggatacgctggcattggcggagtttgatgaagaggtgaagcagtcactggaggcatgcgattatactgtcattgcggatgaaggcatactaagggcggtatcggcagataccttgcagcgccggcatgagatagaagatcatgacttcttttatgagctttttaagaggcttgagagaaatgataaaaaaatctttgtgattgcagagtcgcagaaagctgttgatgaggctgaggaatttctgcttggattatttgacagagcgcgaatatccggaaagggtgttcttgatgactcaccgggatgcagcgaaaaccttgtcaatgaaattaacatcgtttcacctgatgtgattgcatcatttcttccgtctccggcacaggagaagttccttttacacaacagggaaaagctgttgatgaacctctggtacggaatcggaaataataagttcatggggaaaaagcatggatttattggaaaaataagaaaaatgcttgatgtgaagcgccttacgcatattatcaacacctatgaacatagataaaacagttagatatagttaattcttataacaatagaagaaaaaataagaggaaatgtgtaaaaattgtacatttacctctttatttttttgtgcgaatgtattaaaataatagcaagtatttatgcaattagttataaagtgactgtgagggcaatgcacagttacaaaaaggggagaaggagaacaatttatgatttccaatcagatacttcaaaatacaattgatggccttaaaggaattacaagaaccgatctttgtgtgatagatgttgagggcaagattcttgcagctacatttccgaacgcagaggcgtttatagagccggcacaggcctttgttgcatcaccggcagacagtcaggtgattaatggatgccagtttttcaaagtctttgatgatcaccagctggaatatgtgcttttagcttatggtgacagcgaggatgtctacatgataggcaagattgcaagcttccagattcagaatcttctggttgcgtacaaggagcgatttgaaaaggataattttataaagaatctgcttttggataatctccttctggttgatatatacaatcgcgcgaagaagcttcatattgatattgaagtgcgacgggtagtatttattgttgagacaaacagggagaaggacggcaacgagcttgagaagatcagaagtcttttcggcggcaaatcaaaggattttgttacagctgttgacgagaagaatataatagtagtgaaggaactggcagaaaacgagacctatgatgatctcagaaagacagccgaggtgattttgaatctgttcagatccgaagcggatggggtacatattgcatatggtactgttatcaatgagttgaaagaggtgtcacgctcatataaggaggccaggatggctctcgatgtcggaaaaatctttttcgaggagaggaatattatagcatattcccagcttggaataggccgtctgatatatcagctcccgattcctctatgcaagatgtttatcaaagagatattcgatggcaaatcccctgacgattttgatgaagaaatattatctactataaataagttctttgagaatagcctgaatgtatctgagacttcaagacagctctacattcacagaaatactcttgtatatagattggacaagcttcagaaaagtacagggctcgaccttagagtgttcgaggatgccatcacatttaagattgcccttatggtagtcaaatatatgaaatatatggaatcaatggactattaaggagaaagtaatgattaaacttgaacatgtcagtaaggcatattctgcaggtatacctgctctcaatgatgtcaatctcgagattgatgatggagagtttgttttcgtatgcggagatagcggatccggcaaatccactttgattaagcttcttttaaaggaacttgatcctacagacggaacgattactgttgacggaaggaatctgacgcgcattcgccacaagcaggttcctaaatacagaagaaatgttggagtcgttttccaggacttcagattattaaaggataggaatgtttatgaaaatgtagcttttgcactcaaggttatcggtgcatccacagctgttattaagaaaaaggtgccacagatgctttctatggtagggcttgctgcaaagtacaagtcaaagccgagagagctttcgggaggagagcagcagagagtagctattgcaagagctcttgtcaatgagccgagcatgctgcttgctgacgagccgacgggtaatctggacaataacaatgcgtgggagattatgaaactgcttgaggaaatcaacgagaaaggcacaactgttatcgttgtaactcataatcttgagattgttaaggttatgaaaaaacgtgttatcactataaagaaaggtcttgttgtatctgacagcaaggatggtgatagtgatgaggattaatacgtttttttattcaatcaagcagggatttaagaatatattcagaaacaagatgttttcactggcatccatagcgacaatggcagcctgtatttttatgtttggtctgttttatatagttgtgacgaacttctcaagcatggttaagacagctgaggagggtgttgctgtcacagtgttctttaatgagggcactacagaggatgtaataaaagcggacaaggctcagatagaaaagagggctgaggttggcaaggtggattatcagtcagcggccgatgcatggagtgattaccagaaggagtattttgagggctacgatgatgctgcagcttcatttggtgatgataaccctctcagtaattcagcaaatctgcaggtttatttgaatgatgtctctatgcagcagactcttgtcaactatatcaaggggctggagggcgtcagaaaggtaaaccagtcgcaggatgtggccaatacactgaccgatttaaataagcttatcagctatgtatcgggaggtatcattctgattcttctgtgtgttgcgattttccttataagcaacacagttactacaggtattgcggtcagacgagaggaaatagctatcatgaagcttatcggagcgacggattttctggtcaggtctccgtttgtggtagaaggtattctcattggactgataggatcagcgattcctctgggattgcttagtgtcatgtatggaaagatttgtgcatatattgctaataagtttagttttataggaaatatgatgacatttatcccgacaaaggagattttctctacacttgtaccggtagcgcttatactgggcgttggaattggctttttgggaagccgattcacaattcggaaacatttaagagtataataataattatgacggcctggctccgatcggagacaggctgttttaagttcatatcataatatagagaggacaggactgaaatggataattcaaacaacaacggcttagaatacgatgataattcagatatgagcgataaaaagcctcatagaaagggatttagaaatgggttcggtgtcgggattgctacaggtatagtgaccaccattgtgcttggattgattgtgctctttgcatacacaatgattacaggcaggagcgtgcataccgttgcaaaaagcgcagatgtgcttgacgacaagaccgtgcagaaaatcgatgagcttgcgaactacatagacgagtactactatgaggattacgataaggatgatttggaaaacggtctgctacatggtgtgatggaggggctgaatgatccttattcggtttattataccgcggatgagtataaggaactgcaaatcagtacgacaggcacgtattatggaatcggggctgcgttaaagcaggatccgaatacaaagcaggtgacagtttcgaaggtatacagtggtacaccttctgaggaagcgggacttaaaaaggatgacgaaatagtctctgttgatggtgtcgaggcaacatccgaggatctcacaaagcttgttgccaaaatcagaggtaaggagggcacgaaagttacgcttgaaatcaggcgtggcgaggatacagacccatttaccgttgatgtggagcgtaaaaatgttgagctgccatcagtggacagcaagctgcttgacaatggagtgggatatatccaggtcagcgagtttcagacaaacacggcaagtcagtttgaggatgcacttgacggacttacaaatcagggtatgaagggtcttatagtggatttgcgtgctaatccgggaggactacttaccgcagtgacagaaatggttgacagactgcttccggcagaaacagttggcaagcttcctgcaggaactgtcgtgtatacaaaggataaaaacggaaatgtccagacatttggtgatgatgatggaaaacagattgactgtcctatcgtagtgcttgtcgatgagaacagcgcaagtgcatctgaaatttttgcgggagccatgaaggattacaatgaggatggttatattgatgccacacttgtaggtaaaaagacatttggaaagggaattgtacagactatctacaatctttccgatggcgatgctgtaaagattaccacatcgaagtactacacaccaaacggtcacaatatccacaaaaagggtatcgagcctgatgtagaggtcgattatgaatatacaggagatacaaatgcagactatgacatgcagtatgatgtgcagcttcagaaagcgattgaggtgatgaatgaaaagcttaaataagattgcatgctttctcatgctgtgctggatggtagtcatctttatgttttcggcggagcctgacaccgagtcgtctgagctcagcggcagcgtcagctatcgcatagtttctgtggtcaataccattactgcaagccactgggatgagaaggagctgctcgataaggcagagcttatagactatccggtgagaaaatgtgcccacatgagtgagtatgccattctcacattgcttggctttttgacattttcgttcttgcatggcagaagaagagttttgattccgataggcgtgaccttcatatatgcctgcacagatgaaattcatcagctgttcgtgcccggccgggccggcaagtttaccgatgtgctgattgataccacaggcggtataattatgctgctatttattgcacttgttacacatgtggcgcatgcgaagcatacagcaggagctgtgaaaccgaaaatatgaaaacatgaaaacatgaagacacgaagataagtgggctgtaatcgttgccagtcacaacactgttaggtgagacccgcaacagacatgataataagcttgatgataagcatgattataagtgccaaatttagttgcagttttcacatttaatctgtataataaaagtattgacgctggccgaaaaaacatggcatataacatacgtttttaatatgtgccacaaccagcttcccgcccagtaaacccaggtttacggacggcacatagcatgttccgaagaaaaatatgaactgccacggggttccattaaaaatataaatgaaacaaagtgaaaataaaaaatcactattcgaaaaaaatcccgtggctgacttcatatttttcagaggaatatactatgtgacagccgcaccacacagcctgaatgcgggaagcgtcattaaagccacaaagcgtctaaaatgcaaagaaagaggtgattctgtggtagagttggataatttcaagtccacgctccaaggctacaaagccccactacaggaagtgagggattcactttgacctggctaataaagaagaaaaaatccaggaattagagcgagaaatggaagctcctgacttctgggatgacccggagaagtcacagagcaagatgaaagagcttaagagtatgaaggatgatgtagctacatacgcaaagctcaaggaacagtacgaagatatagagacgatgattgagatgggctatgaggagaacgatgagtcactcatacccgagatacagcagatgcttgatgattttgagagcacatatgacggtatcagaatgaagactcttttgtcgggagaatatgataaatgcaatgcgattctgaggctcaatgctggtgcaggtggtaccgagtcgtgtgactgggcggccatgctgtttcgtatgtactcgaagtgggctgacaaaaagggctttacccttgaagtactcgactcgcttgatggcgatgaagccggtatcaagtccattaccttccaggtaaacggagagaatgcatatgggtatttaaagtctgaaaagggtgtgcacaggcttgttcgtatttcgccgtttaatgcggcgggaaaaaggcagacctcattcgtatcatgtgatgtcatgccggatattgaggaggatctcgatattgaagtgaaggacgaggatatcagaattgatacctaccgctcaagtggagcaggaggacagcatatcaataaaacttcgtctgctattcgtatcacacattttccatcagggatcgtggtacagtgtcagaatgagcgttcacagcatatgaacaaggacaaagccatgcagatgttaaaggcaaagctgtatcttttaaagcaggaagagaatgctgcaaaggaggcgggcatcagaggcgaggtcaaggaaattggctggggaagccagatacgttcgtatgtgcttcagccttacaccatggtcaaggatcacaggacagatgtggagaccggtaatgcggatgcagtgctcgatggcaatatagatatatttatcaatggttatctgaagtggcttgcaacacgttcagaataaggaggcaaatgtggggttagttatagctgtggcgatattggcagttctgacagctgccggagtgaccgtttatattaaagtcagacggttgtctgaaaatcttcttggtacacctgatgtcacagagggcatcaatcgtatcagggagaatgtctctacgactccaaagtcggtttcaggcatgacgcgccttatggagccacagataaaaagggattttccggagtttgtctgggaacagtttaagagaatgtcagaaagagtgcttgtgtcagcactttgtgcaatcacgactgaggatatttacaagctggaccgtgaggcttctgatgaggtaagacagcaggtgctggtgcgtatagacagcaatgaagcagctggctttacagagcattttgacgagatcagggtgcatcagactgaaatctcaaactatgtgaaaagagatggaaggtgcgtcatcagtatacagagtgcggttgagtatttttactacaagactgcctcaggaaagcttatcagtggtgataaagagtataaaaaacagaccagatacaatatggagcttgtatacatacaggatatagatatgctggataatgcagggataggcagtgcagttggcactacatgtccgaattgcggtgctccggtcagaagtcttggagcaaagaaatgtgaatattgtggctcatatgttgagcctgtcaatataaaagtatggaagctacagagctttcatgaagttgattacaaccatatctaaggaggaagaaaatgggaattattaaggcagtaaaacaggcaattggaggcggctttgcagatacatggcaggaggttattgagccggataatataggcgaccagacagtctatgccaggggtgtgctggtaaacagggggcagaataaaaaaggctctgacgatattgtttcaaacggctctatcattcatgtatatgacaatcagtttatgatacttgttgatggtggcaagattgtggattacacagctgaaccgggctactacaaggtgagcaattcatctatgccgtcacttttcaacggacagtttggggattctttaaaggaaacctttgaccgtgtgagatttggtggacagacaccacagtcacagaaggtttattatatcaaccttcaggaaatcaagggaatcaagtttggtacgagaaatcctataaactactatgatacattttataatgcggagcttttccttcgtgcccatggtacatattccatcaaaattgtgaatccgcttcagttttatgcagaggctattccaaagaatatggatcatgtggagattactgatatcaatgagcagtatctgtcagagtttttagaggcattacagtctgccatcaaccagatgtcagcggatggtacaagaatttcattcgtcacaagcaaggcatctgagcttggaagatatatggccaagtgtcttgatgaaagctggaatcagatgcgtggtatggaggtacaaagtgttggtatcgccagcctttcatatgatgagaagtctcaggagctcattaacacaagaaacgagggcgcaatgctctcagatccatctattgcacaggggtatatggtcaaaaatatgtcagagggtgtcaagaatgcaggcagcaacagtggtggagctatgcagggcttcatgggtgtcggcatgggaatgagcaccatgggcaatatgatgaatggttttacacagatggcacaaaataacaggtcagccggaatgaatgcgccgggaaatggtgcagcaggtatggcagcaggagtggcttcaggtgccacacagcaggaggatgcgtcaggctggacatgtgagtgcggacagaaaaacacaggtaaattctgcagtaattgcggcaagcctatgccacaggagattacagagtggacatgtgagtgtggacagaaaaatacaggtaaattctgcacaaactgtggcaagccattacctgtaaacacagagtggacatgtgagtgtggacaaaaaaatacaggtaaattctgcagtaattgtggaaaaccaagagcataagatgttgcaaagctgtaatctttgtgttaaaatctttgagtcaaggacaaatgtcggtgtgtgacaaacacacaccggccattttggaggtaactaaatggcggagaaatcaaactacttcgttttacgggcaaaggctgtaccggaggtgctgcttaaagtagttgaggcaaagagactgctggattcgggcaagcttgaatctgtgcaggaggcaacagatgctgttggcataagcagaagctcattttacaaatataaggatgatatttttcctttttatgaggggcgtaaaggaaagacagtgaatcttgtcattcagatggatgacgagcagggcatactttccgttgtgcttaagtcggtagccgatgcgaaagcaaatattcttaccatacaccaaagtgtaccggtaaatggcattgcgtcactcacgttatctgtggatgtatttccggagtcggatgatgtggatgatatggcaaagcagattgagtccttaaagggcatacattacgtaaaaattttagccagggagtaacaaaaagatgaagattgcagttatgggttacggcacaattggatcaggtgtcgtagaagtattagaaatcaacaaggaaaaaatcgcaaagagagcaggagagccaatcgaggtcaagtatgtgcttgatttaagagagttcccaggtacacctatcgagaacaaaatagttcatgattataaggttattgcagaggaccctgagatcggtatagttgtagagacaatgggaggcgttgagcctgcatttacattcgtaaaggcaatgcttgaggcaggaaaacaggtagcaacatcaaacaagaaccttgttgccgcaaagggcgctgagctcatcaaggttgccagggatcatggagtgaacttccagtttgaggccagtgttggtggcggaatccctattatcagaccactcaacaagtgtctcacagcagacgagattgaggaaatcacaggtatcttaaacggaacaaccaactacatgcttacaaagatgacagaggaaggtgcagactttgatgaggtattaaaggatgctcaggataagggctatgcagagaaggatcctacagccgacatagagggacacgatccatgcagaaagatagccattctcacatcgcttgttgcaggacagcaggtggatttcgaggatatccattgtgagggtatcacaaagattacacctgaggatattaagtatgcaaaagcaatgcaccgtgcaatcaagcttcttgcttcaagccgtaaggtgggtgacagctatacctgtctcgttgcaccatatatgatagatgacacacatccgctctcaggagtaaatggagtgttcaacggcgtatttttacgcggaaatgtgctcggagatgctatgttctacggcagtggagcaggaaagcttccaacagcaagtgctgtagtggcagatgttgttgatatgacaaagcatcagaacacgaatatttatatcgactggaagcctgagaagctcacacttgtaagctatgatgacagtgtaaacagcttctttgtgagaactgactcaccaaagagcgaggttgaggctgtattcggacatgtagactacattgaggatgtggttgacggcgagtatgcattcacaacaggcgatatgacagaaaaggattttgccgacaaggcatcaaagataaacgttatcaacagaatcagattataaaggacaaaaatatggtaaaaggcttatacaccgctcacaccggtatggttaatgagatgaagcgcatggatgttcttgcgaacaacctggccaattccgatacctatggatttaaaaaagagggaaccacctcgcattcatttaaaaatgaacttgctataaagataaaggatacatcaaactacggactgcacaaaaatctgggcagcatgacatacggagtgcatctcggtgagacgtataccgactgggatgagggtagctttaaggtgactgacaatcctaccgacctggctatcggtggaaaaggcttttttgccgttgcatttactgacaaatccggtcagacaagtgtaaagtataccagagacggtgctttcaaggtcaatgctgacggttatctggtcacagcagacggagaccatgtgctcaatgcgacaggtgcattgagtggagatggcggtgaagcaaactgggtaaaggtagacccgaatgaaaagttttcggtaaactcacttggatatatcacacagaacaatcagttagttggcactatcggcgttgtcgatgtggataactatgactatattgaaaaatatggtgaaaatctctacaatctgacggccgggggtaatattatagcttccgatgccgaaatagaacagggagccttagaaacttcaaatgtcaatgtggtcaatgagatggtcaatatgattacgatacagcgtgcatatgaagccggacagaaggttattacatctattgatgagacattagacaaggctgtcaacaatgtaggaagagtataaggagatatgccatatgatgagggcactttacacagccgcaacaggtatgcgtgctgagcagacaaatgtagatacaattgcaaacaatctttccaatgtcaatacgacaggctttaagggtcagaggacagagtttaagtctcttttatatcagacgatacagacccgttctacatccggaaatggtgatgcaaagccggtaggagcgcaggtggggcttggtacccgtgtggctgcaaccacatccacttatactcagggtccgctcaattctacggagaggcctactgattttgctttggagggcgatggcttttttgcagtgagaggtactgacaatcagacctattacacgagaaacggtgccttcacatggagccagtatggaaacggacagactatacttactgattcacagggcaatcctgtcatggatacaaacggtaatatcatagctgtgccggcaggtgtgtctgctgagaagatgagctttggagaggatggtgcggtaggttatatgacggcacagggcaattatattaatctgaatcagcgaattgctgtgtatcagtttaataacccgtcaggtcttgaaaagcagtcaggaagcctgcttgcagcaacagccaattcgggcaatccgatgcttgaagctgcaaacccagctctgaaaagcagcaaggttgtgacaggatatcttgagggatcaaatgtgcaggtagcagacgagatggttaacctcattgtggcacagcgtgcctacgagctcaattcaaaggccatcacaacagcggattcgatgcttgagacagcaaataatttgaggagatagtagcatatggatataagcgcagtatcaacacttgcaaactcaaataatacgtctgcggtggcagacaagcttaagaataacgtaaaaaatctttcatcagactctacagaggacgagctcaagagcacacttaaggattttgagtcttatttcgtggagcaggtcataaaggaaatgaaggattccatgacactaaagagtgatgatgaggattcctctatgtcgcagtacaaggatatgttcatggacactgtcatagagcagatgagtgatacgatagtggagaagtccggagaaaacatcacacagcagctttatgagcagatgaagcgcaattacaatatataataataattgataataaaaagccggttcggcatgcttgcatgtggttaccggcttttttagtgcaaacttagtaattgcagatacgcatgctctagggtataatattaaaaaaataaaactattcagagtcacaataaaaacacacagatacggagaaattcaattggaaaccgaaacagtcacaggatacgttgatcatataatatacagaaatgcagaaaacgggtatacggtacttgttcttgtagtgaacgaggaggagctcacatgtgtgggtactttttcggacattgctgagggtgaaaatatagaggctcacggtgagtatacagagcatgccacctatggcagacagttcaaggtagtaagctttgaagagaaggagccggaggatgagatggctattgagaggtatctgggctcaggagccatacatggtataggacttgcactcgcagcacgtattgtcaggcgattcaagaaggataccttccgcatcatagaggaagagccggagaggcttgctgaggtaaagggcatcagccagagaaaggctatggagattgcggaccaggtcaatgcaaaaagagacttaagggaagccatgatttttttgcagcagtacggcatcaatatgaatctggctgtgaagatatataataagtatggcggagagatatacagcgtgctcaaggaaaatccgtaccgcatggcggatgatatcgacggagttggttttaaaactgcagatgagatagcggcgcgggttggcatcaagactgattctgattttagaataaaaagcggtatacagtatgttttgcagcaggctgccatggacggacacacatatctgccgatggaggagcttacgaggcgtgctgtatatctgctcggagtggaaagctcgcaggttgaggcacattacatgaatctggccatggacaggaagattgtcatgcagctaaaggatgatataacccagatttatgctaacaccttttattatatggaggcaaacacggcagccatgctaaagcagcttgatgtgacgtatgatgtgccggatatcgagatagaggctgcaattagaaatatagagaaaaagacagagatggagctcgatgagcatcaggtagaggcggtgaaggaagcagtcagaaatggccttttagtcattacaggaggacccggaacaggaaaaaccaccactatcaatactattatcaagtattttgaactggagggcatggatatttttctggctgcaccgacaggccgtgcggcaaaacgcatgagtgagacgacaggctacgaggcgcgcacaatccaccgtatgcttgagttaaacggcggcatggacacaggaagcgcagctggctttgagagaaatgaaaggaatccgctcgagacggatgtaatcatcatagatgagatgtcgatggttgatatatcactcatgtactcattgctaaaagcggttgtggcaggtacgagactcatacttgtaggagatgtgaaccagcttccgagcgtgggaccgggcagcgtgctaaaggatattattgattcaggtgccttccacacggtaaagcttacaaagatttttcgtcaggcgagcacgagcgatattatagtaaacgcccacaagataaataatggagaagaggtatcgttagataataagagcatggatttcttttttctaaagagatatgatgccgacaagataataaatgttacattacagctgataaagcagaagcttcctaagtttgtaaatgctacagagtatgatatacaggtgcttacgcctatgagaaagggacttctcggagtggaacgtctaaacggtatattgcaggcgtatatgaatccggcagacaagagcaagcgcgaaaaagaatacaggggcacgattttccgcgagggcgacaaggtgatgcagataaagaacaactatcagatagagtgggaaattaggacaaaattcggactttgtgtggataagggcatgggaatcttcaatggagatacaggtatcattgaggaaatcaacgattttgccgagaccatgaccatatcctttgacgagggcagaaaggtggagtatccgtttaagcttttggaggagcttgaacttgcatacgcggttactatacacaagtcgcagggaagtgagtacccggcggtcgttatacctcttttgagcggcccgagaatgcttatgaacaggaatttgctttatacggcggttacaagagcaaagaaatgtgttaccatagtgggtgacgaacagacattttatgagatgatacaaaacaactcacagcagagacgctatagcgggcttaaagacagaatagtggaggagactatctgatgaaaataagaaaacttacaaatgaagagataaaaggggcatgtgcctttgcggtaagtatatacaatatcgcaatcagaggctgctttcggacacaggactgtcatcgatattttgatgaatatatggatgcagacaggctgacggacgaggaaagggccggtgttcttgtagtatttggtgcgtttgatagcaatgtgctgtgcggagtgtgcggcatgacaaacgaggggcatatcaccatgctgtatgtgcatccgcagtatttaagacgtggaattggcaaaaagcttctggagagagtcaggatatatgcgcgcatgcagcttaagctcatgcaggtgtctgtaaatgcaatgccggcatacacggcagactacttcagtcgtgtgggctttaagagtgcatatcagggaggcttttgcaatggacaaggcgatatgtacgttcctatgacagcaaaaagcatatatcaggtggagtatacaccgcgacatatagctgataagacttttattgcaatttcagttggctttacatgccttgtatttttttcaggactgatatatgcggtatgcgcggggcttactccgtaacgctcagatgcagttttaatgggctgcaatagttgccggtcatactttggtgtgaacagtaactaatattgtatacataaatatgcatatttatgtaacaaaaaacagttgaaaaatcggctgtattatgatacactttttacaatttaagcagatatactatgcaactacactttataagaaaaaagagacgccctctttttttttgcgcagacataaggttagttgcagctaagaagcttatggttacaaagtataacacgaaagggcagggtaaagatgaaagcatttttaattcttgaagatggtaatgtatttaccggaaccagcattggttcaacaagggaagtcattagtgagatagtatttaacacatcaatgacaggatatctggaggtacttacagatccttcctatgcaggacaggctgttgtaatgacttatccacttatcggaaattatggaatcacaccggatatggagtcagaaagaccatggccggatggatatatagtaagagagctgtcacgtatgccaagtaatttccgctgcgagggtactatacaggatttcctcgagaaaaacgatattccgggagtggccggcattgatacacgtgcgcttacaaagattctcagggaaaagggtactatgaacggaatgattaccacaaatgagaattacaatctcgatgagattattccaaagctcaaggcatatactacaggcaatgtggttgacaaggtcacatgcactgagaaaaaggttttaaagggccaaggaaagagggttgccctcatggatttcggtgccaaaaacaacatcgccaaatcactcaatgaaagaggctgtgaagttacaatttaccctgcacacacaaccgctgaagagatacttggtgacaatcctgacggaatcatgctctcaaacggacctggagatccaaaggagtgtgtagatattataaaggaaataaagaagctttatgacagcaatgtgccgatttttgcaatctgcctcggacatcagctcatggcacttgcaacaggcgcagatacacacaagatgaagtacggacacagaggtggaaaccatccggttaaggatcttgcaacaggccgtgtttatatttcttcccagaaccatggatatgtggttgacacagataagcttgaccctaatgtggctgagcctgcatttataaatgtcaacgacggcactaatgagggacttaagtatgtgaacaagaatatcttcacagttcagttccatccggaggcatgccctggaccacaggattcagcatatctttttgaccgctttattaacatgatgggaggtaaccagtaatgccaagaaataatgatattaaaaaagtattagttatcggttccggtccaatcgtaatcggacaggccgcagagtttgactatgcaggaacacaggcctgccgttccttaaaagaggagggcattgaggtatgtctggtaaactcaaacccggcaactatcatgactgataagcagattgcggatcaggtatatatcgaaccacttactcttgagtcattaaaagagattatcataaaagaaaagcctgacagcatccttcctacactcggtggacaggcaggactcaatctcggcatggagctcgctgagtgcggcttccttgatgagcagggagtaaagcttatcggaacaacagcagagaccatcttcaaggctgaggaccgtcaggccttcaaggataccatggagaaaatcggtgaaccaatcgcggcttcacaggttgtaaagaatatcgaggacggtattgcatttaccaacaagattggttaccctgtagttcttcgtcctgcatttacactcggcggttccggcggtggaattgctcacgatgagcaggagcttatagacatactttcaaatggacttcgtctgtcacgtgtcggagaggttcttgtagagagatgtatcgcaggatggaaggaaatcgagtacgaggtaatgcgtgatgccaacggcaactgcatcacagtatgtaacatggaaaatatcgaccctgtcggtgtgcatacaggagattcaatcgtagtagcaccttcgcagacacttggagataaagagtatcagatgcttcgtacatcagcgctcaatatcatcaacgagcttcagattacaggaggctgtaacgtacagtatgccctcaatcctgactcattcgagtactgtgttatcgaggtaaacccacgagtttcacgttcatcagcactcgcatcaaaggctacaggatatcctatcgccaaggttacagccaagattgcactcggctatcacctcgatgagatcaagaacgctatcacacagaagacatacgcaagctttgagccaatgcttgattactgtgtagtcaagatcccaagacttccgttcgacaagttcctcacagcaaagcgtacacttaccactcagatgaaggctaccggagaggtaatgagtatctgcaacaacttcgagggtgcccttatgaaggctatcagatctctcgagcagcatgttgattcacttatgtcttatgactttacaggtcttacagatgatgagcttgagaaacagcttgcagttgttgatgacagacgtatctgggttatcgcagaggcgctccgccgtggagttaaatacgagcatattcacgagattactaagatagatctttggtttatcgataaaatctcaatacttgttgagatggagaaccgtttaaagacagaggagcttacagttgatctgttaaaagaggcaaagcgtatcgagttccctgacaatgttatctcacagcttacagatattgatgaggctgatatcaagaagatgcgttacgacaacggcattgtggcagcctacaagatggttgatacctgtgccgcagagtttgaagcagagacaccatactactactcagtattcggcagtgagaatgaggcggcagagacaaatccacagaaaaaggtgcttgtacttggttcaggacctatccgtatcggacagggtgttgagtttgattactgttcagttcactgtacatgggcgtttgccaaggaaggctgggagacaatcatcgtaaacaacaaccctgagaccgtttcaactgactttgatattgctgacaagctctattttgagccactcacagcagaggatgttgagagcatcgttaatattgaaaagcctgacggagctgttgtacagttcggtggacagaccgccatcaagcttacagaggcacttatgaagatgggggtcaagatacttggaacaaaggctgaggatgtagacgcagccgaggacagagagctcttcgacgagattcttcagaagacaggtatcccaagagcagcaggtggtacagtatttacagctgaggaggcaaagaaggtagcaaacgagatcggttaccctgtacttgtccgtccttcatacgtgcttggcggacagggtatgaagattgcatggaatgatgatgaaatcgaagagtttatcggcatcatcaacacaatcacacaggatcatccaatccttgtagataagtaccttatgggtaaggaaattgaggttgatgcaatctgtgacggtacagatatcctgattccgggtatcatggagcacatcgagcgtacaggagtacactcaggagactctatctcagtttaccctgcacatactatctcagaaaaagcaaaagagactctggttgagtatacaaagagacttgcacaggcactccatgttgttggtatgattaatatccagtttatcgatatggacgacaacatctatgttatcgaggtaaacccacgttcttcaagaacagtaccatacatcagcaaggttacaggtattccaatcgtagacctcgcagcaagaatcatcatgggtgagacaataaagggcatgggctacacacctggacttgctccgacagccgattacattgcaatcaagatgccggtattctcattcgagaagctgcgtggcgctgagatttcactcggacctgagatgaagtcaacaggagagtgtcttggaatagacaagaccttcaatggtgcgctttacaaggcatttgagggtgcgggagtcgagcttcctaagtacaagcagatgattatgactgtaaaggatgccgataagcctgaggcagtaggcgttgcaaagcgttttgagaagcttggctacaagatttacgccacaagaagcactgcaaagtacttacaggagcacggagtaaatgctcttcgcgtaaacaagatatcacaggagtctccaaacgtcatggatcttatcctcggacacaagatagacctcgtaatcgatacacctacacagggtaacggagacaagacaagagacggcttccttatcagaagaaatgcaatcgagacaggtgtttattgtatcacagccatggatacagccaatgcacttgcacatgcattagagactgcttctgacaagaagacaccggttgacattgcaacagttaagaatctttaaaagtatatagaatatattttatccccggacagtatagcggatatgctgcccggggattttttataaaatcaaaaatatgatgtgttatgcctgtatgcatgccgcaggttataatagaatcggtttttgttaatctgacggaatagtataagtaatacgcgtgaaaaatatgcaaagtttaatagaaatttgacaaattattaacaaaagcaattgatttttacataaatttgtagtataataactttgttaaaaaattaacagcacggatgtgcaatacaatttaaaggagataatataatggcaaagaaagttgtaatcgcaagtgcttgccgtacagcaatcggcaaaatgggcggagcattaagcaatactccagccgcagatttaggtgcaatcgtaattaaggaggctttaaaccgtgcaggtgttgctcctgagatggttgacgaggttaagatgggttgtgttatccaggcagctcagggacagaacgtagctcgtcaggcttctatcaaggcaggacttccaatcgaggttccggctatcacaatcaatgttgtttgtggatcaggtcttaagtgcgtaaacgacgctgctacaatgatcaaggccggtgaggctgatatcgttgttgccggtggtatggagaacatgtcaatggctccttacgctatgacaaaggcacgtttcggatacagaatgaacaatgcaacaatcatcgatacaatggttaacgatgctcttacagatgcattcaaccactatcatatgatgatcacagctgagaatgtatgtgataaatacggcatcactcgtgaagagcttgatgagttctcagcaaactcacagcagaagtgtgaggcagctatcgcagcaggcaagttcgatgatgagatcgttcctgtacctgttaaggttaagaaagaaattgttgagttcaaaaaggacgagggacctcgtgccggaacaacagtagagactctttctaagcttcgttgctgctcaggtaaagagggcggacttgttacagccggtaacgcatcaggaatcaatgatggtgctgcagcagtagttgtaatgagcgaagagaaagctaaggagctcggtgttaagccattagctacatgggtagcaggagcacttggcggagttgagcctgagatcatgggtgttggaccggtagcttctacaaagaaggttcttgcaaagacaggtcttacaattgatgatttcgatcttatcgaggcaaacgaggcatttgctgcacagtcaatcgctgtagcaagagatcttggcttcgatatgagcaaggtaaatgtaaacggtggtgctatcgcactcggacatcctgtaggagcttcaggctgccgtatccttgttacattattacatgagatgcagaagagaggatctaacagaggtcttgcaacactttgtatcggtggtggaatgggatgttctactatcgttgagaagtactaattttctttgccaatagatatatgaggggatgcaggtgcatccccttgtagtgtgaattagtttattcacatcagtttatatatatgattaagttatgctgcagaggcttagcacttaaagctttttgcgccataatatattttaggaggaattaaaatgaaggttggaattatcggtgctggtacaatgggccagggaatcgcaaaagcattcgcacaggtagatggatacgaggtagcactctgcgatattaagcaggagtgggctgaaggcggaaaagacaagattgcaaaaggatatgcaagacttgtagcaaaagagaaaatgacacaggagaaggttgacggcattcttgcaagcatcactcctggtttaaaagaagatctctgcaaggattgtgacctcatcgttgaggctgctttcgaggatatgcaggttaagaaaactacattcgctgagttagacaagattgctaagccagagtgtattttcgcttcaaatacatcatcactttcaatcacagagattggaaacggacttacacgtccattaatcggtatgcacttcttcaaccctgctgaccgtatgaagttagtagaggttatcgcaggtgttaacacacctgttgagacagttgatgcaatcaagaagattgcagaggagattggcaagacacctgtacaggttaacgaggctgccggtttcgtagtaaaccgtatccttatcccaatgatcaacgaggctgctttcatcaagatggagggcgtttcagatatcgccggaatcgatgcagctatgaagcttggtgctaaccatccaatgggaccattagagcttggagatttcatcggacttgatatctgccttgcaatcatggacgttctttacaatgagacaggtgacagcaagtatcgtgcatgcccactccttcgcaagatggtaagaggcggaaaccttggatgcaagagcggcaagggattctacgtttacaacgcagaccgcacaaagacacctgtagacgcaatgtaaaagagattaaaacaaaatataaatttcaaggagaataaatcatggatttcactttagatcagaaacatgagatggctcgcgaccttttcaaacagttcgcagagacagaagttaaacctcttgcacaggagactgacgagacagaggtattcccagcagagacagttgctaagatgggaaaatatggattcatgggcattcctgtaccaaaggagtacggcggacagggctgtgatccacttacatacgttatgtgtgtagaagaattatcaaaggtttgtggtacaacaggcgttattgtatctgctcatacatcactttgtatcgatcctattatgacattcggtacagaggagcagaagaaaaaatatgttcctgaccttgcttcaggcaagaagatcggtgctttcggtcttactgagccgggcgctggtacagatgcacagggatgtcagacaaaggccgttttagacggagacgagtgggttcttaacggatctaagtgcttcatcacaaacggtaaggttgctgatgtttacatcatcatcgctattacaagcatcacagaggacaagcgtggacgcaagaagaagaacttctctgcattcatcgtagacaagggaacacctggattctcattcggaacaaaagagaagaagatgggtatccgcggatcatctacatacgagcttatcttcgaggatgcacgtattccaaaggatgcattacttggaaaagagggaagaggtttcccaatcgctatgcatacacttgatggtggacgtatcggaatcgctgctcaggcacttggtattgcagagggcgcattagagagaactatcgagtacacaaaggaaagaaagcagttcggccgttcaatcgcacagcagcagaatacacagttcaagcttgcagatatggctacacgtatcgatgcagctaagtatcttgtatacgcagcagctatgaagaaggcagagtttgctaagaaccctaaggtttcttactcagtagatgcagcaaaggctaaattattcgcagcagagacagctatggctgttacaacagagtgcgttcagttattcggtggatacggatatatccgtgagtacgatgtagagcgtatgatgcgtgatgctaagattacagagatctacgagggaacttcagaggttcagcgtatggttatttcaggctcattactcagatagttaagagagctatcataactgtagagctacttagaataaataaaggagaacaaatacatgaatatcgtagtatgtattaaacaggttcctgatacaaagggtggagtaaaattcaatcctgacggaacacttgatagagcttcaatgcttgcaatcatgaatccagatgacaaggctggtcttgaggcagcacttagaatcaaagacgagacaggcgcaaaggttacagttcttacaatgggacttccaaaggctgatgcaatccttcgtgaggcaatggctatgggcgctgatgatgcagttttagtaacagacagagtacttggtggagctgatacatgggctacatctactacaattgcaggtgcattaagaaatctcgattatgatttaatcatcacaggccgtcaggctatcgatggagatacagcacaggttggaccacagatcgcagttcatcttggacttcctgtaatctcatacgcagaggatatcaaggttgagggagattctgtagtcgttaagcgtcagtacgaggacagatatcacgtagttaaggctaagatgccttgtcttatcacagctctttcagagttaaatgagcctagatatatgacaccgggcggaatcttcgatgcatttgacaaagaggtaactgtctggggcagagctgatcttaaggatgttgacgattcagatcttggacttaagggatcacctacaaagattgctaaggcatctgacaaggtacctaagggagctggagaaaaggttaaccttgatccaacagagtcagtaaactatctcatggagaaattcaaagagaaacatatcatctagtatggaggaaccaaaaatgggtttagaagaatataagggcgtatatatctacgcacagcaggtagacaataagcttagcgacatcgcctttgagttagtcggtaaagctaaagagttagcagcagatttaaatacagaggttactgcagtacttcttggatctaacgtaaaggctcttgcaacagagcttggtgagtacggcgcagacaaggtaatcgttgtagacaatcctgcacttgagacatacagaacagagccatacgcacaggctcttgtatcagtaatcaacgagtacaagccggagatcatgttagttggtgcaacagctatcggacgtgacctcggaccaacagtttcagcaagagttaagacaggtcttacagctgactgtacaaagcttgagattggtgatttcccaatcaacgctatgcctggacaggagcagaagcacaaccagcttctcatgacacgtcctgcattcggtggaaacacaatcgcaacaatcgcttgtcctgacaaccgtccacagatggcaacagttcgtcctggtgttatgcagaagcttcctaaagaggctggcagagcagcagaggttatcgagttcaatcctgcactcgaggagaacaaccgttatgttgagatcatggatatcgttaaggcagttggcaacgtagagaacatcatggacgctaaggtacttgtatcaggcggacgtggagttggaagcgctgagaacttcgagatgcttcgtgaccttgcttcatgcttcaagggtggtatggtatcatgctctcgtgcagcagtagagaacggctggttagcacaggattatcaggtaggacagacaggaaagactgtacgtccacagatttactttgcaatcggtatctcaggagccatccagcacgtagcaggtatggaggagtctgatctcatcatcgccatcaacaaggacgaggatgctccaatcttcgatgtagctgattacggcttagtaggagatttaaagaagatcgttcctcagcttacagcagctcttaaagaggcaaatgctgacgcataatcgcataataatgcaataaaattacattactaatacatttaaacacagtactgtttatcgcagtactgtgtttttttgaccataaatatagcgtaatctttgttatactacgacatctagtcgcatattataaatttacccccacatttatgaaaaattcggctaattttacaattgagtcatttatcccaatgtgatagaataacaacgttcaatcaaatgtggaggaattggatttcgaaaagttaaaaactttagcgccatgcaccggcaggtacgtaaaatgatgccggttaacgaggtttcaggttatcgaaaattcggcggatgcctggacgcatatatggatgcgcatctcgagccaaatatgatggagacatcaaaacaaagcgagagaaccataaaaatcaagtagctattcagtacagaacagttacatatttgtacatttaaaattatatatcgaaaaggagatctaacactatgtgtggaattataggatttacaggccgtttagaggcacagaagattttgacggaaggactcgcagcgttagagtatcgtggatacgacagtgcaggtattgcttatttcaaggatacaggcaagatttctatccgcaaaaccgttggaaaggttaaggatcttctcgctatctgcgatgatgagaacaattcaacctgtggaatcggacatacaagatgggcaacacacggcggagttaccaatgccaatgctcatcctcacaaggttggaaatgtcgcactcatccacaatggtatcattgagaactaccacgagattgtaaacaagtatgatcttgcagactctcttatatctgagacagatacagaggtagcagcggctcttatcaacaagctctatgacggagatccaaaggctactattaagaaggcagtagcagagcttcagggttcatttgcgttctgtatcatgttcaaggatcagccgggaaagatttttgctgtcagaaatgtaagcccgatggttgcaacatattgcgatgacggagcatttatcgcatctgatcttacagcgtttatcaaatattcaaagcgctattttatacttccggagtacactatcatgacaatgactgctgatggaatcgaaatggaggatttagagggtaagaaagttgagccggattatcttgaggtaaactgggatgtgacggcagctcagaaggatggatatccgcatttcatgatcaaggaaattcatgagcagccaacagctatcacaaggactatcactccaagaatcaaggattcacttccttgttttgaggatgataatatcccggattcgttcttcgaggatataagcgacataacagttgtagcctgtggtacagctatgtatgcaggaatggtcggaaaagctcttttaaagaacaagtttggtattcctgtttctgttgagattgcatcagagttcagatatgagcagcctgttctcacagacaggtcaatggttatttttgtgtcacagtcaggtgagacaatcgataccttagaggcacttcgtctggctaataagtatactaaaaagacgctttctatcgtaaatgtaaagggatcaacaatagcccgtgagagcaactatgtactttatacacacgcaggtcctgagattgccgtggcaagtaccaaggcatacacagttcaggtggcaagcttttacttgattggatgcaagattggtcttgtatccagccgtatgaccaaggaagaggcaaagacatttattgagaatctgcaggaggttccaaatctcattgagtcagttatcacacaggcacctgagattgaacagcttacgaagagaatgacaaatgctacaaatgcgttttacataggccgaggacttgattatgcattaagcatggagggcgcactcaaactcaaagagatttcttatattcatgctgaggcttatgcagcaggagagttaaagcacggtacaatcgcgctcatcagcgatggtgttccggttatcgcagttgctacacagagccatgtatacagcaaggtcatctcaaatatccgcgaggtaaaggcgagaggcgcatacgttatccttcttagcaaggacaaggatattacagataagtcaatctgtgatgtgcatatctcactcccacaggcaccggatgagtttgtgattttcgagtcagttataatctgtcagcttatcgcttactacacatcaacaggaaagggcttaaaccctgaccagccacgtaaccttgcaaaatcagttaccgtagaataaataatttccccggacatttatacgatgtccggggattttttttcacgcttgtgagatacaatgcagcatatgtaagacatcgatgtatatgtcagtgatttgcacggcaacaacacattttgttaaaaaattgttaaaaaaataacaaaaactgctttacacacttcttgcacggtggtatgatacataaatgcgggttactcatacgagaatccagcagccatacaattttcatgtgcgctcttatgccgtgtgacagaatcacagcataacagaattaggacgagacccatatgggcttttaccaaaaggaggaaaaacaatgcgcaattcaaaaacaaacgaacttgtactgacaggtttattcacagccattatcattatcatggcattcacaccactcggatatattccgctcgtagttatcaacgctacgattattcacattccggtaatccttggttcacttttctgcggacctaaaaagggagcattccttggatttgtattcggatttaccagttgtttaaaggcaactatagtcggaggaactctttcatcctttgtattttcgccggtgcttgccgcatccctggtcggaacctcaggtatatttaagagcttattcatagcatttgttccaagaattttagtaggtgttataccttattttgtatatataggcatcaaaaaggtgcttgcgtcagagaagaaaaatctctggggcacagttttaaatgtgctcatgtcagtattccttgcattcggagtatatgcattcctcggcaagatgtcagagtcactttcacaggcagctgctttaggaatcggcatagcagtcggagctgtagtatttatagtagttgaggctgtatttatcagaaagagcacacaggttattccgtttgtatatgcaggtgtagccggtgccatgaccaatacactgcttgtaatgggctcaatcttcgtgctttacaaggatgcttatgcagatgcaatcggtgtggcaggaaacgccgtgctgggcgttatcaccggcgtcatcagttttaacggagtcattgaggcaatagttgccgcaatcatcgtataccttgttggattggttttaaatactatcaaaccaattgcagcaaaataaattcagatagatttaaaataaatgtgaaattgtatgtacggcggactgataaggtccgcctgttttataagcagttggactgggaacggtaaaaaagcatttgagttaaaagaaaggtatgatacaaggtgaaacatatgcatgaaatagacataatggatatcggcggcttcaaaataggccaagccgaggacactaagggcttgaccggctgtacggtatttctttttgataaacagtcaccggcgggagttgacataaggggaggcggaccggcttcgcgggagacaccacttttaaatcctgtggcagacgcaaagggtatacatgctcttgtactgtcaggcggctctgcctttggtctggatgcagctggaggcgtgatgaagtatctcgaggagcgcgatataggctttgatgtgggagttacaaaggtgcctcttgtggtgcagtcgtgtatttttgacctggtaataggtgataaaaatgcaaggcctgatggcaaaatggcatacaaagcttgtgagaacgcttcctatgatacctttttacagggaaattatggagccggaatgggcgcaacagtcggtaaatatatggggcgtgagcgcagcatgaagagcggaataggagcctatgcagtacagcttggagaactaaaggttggagcagtggtgacactgaacgcacttggtgacatatatgacatagatacagataagaaaattgccggagcactggatgaaaatgggctgctttttgatgacgagacagcgtattttgaggcagcggcgaagattcagaatatgtttacaggaaacaccacaattggtacaataataacaaatgcaaagcttgacaagaccgcactcaacaaggtggcatccatggctcacaatggctatggcagagcaatcagacccgtgcacacgatggcggacggagattcaatctatgccgtatcagtgggcagtgtgcctgccgatatcaatctggtggggccaatgagtgcctatgtcatggcaaaggccattgctaatgcagctagaagtgcaaagtctgtggatggctacaaagcattttgcgatgtaaacaaaaaatgactgcagaataatagttttatacagaggtgaaaaacatgttaaaaggaaaaacagtagttttgggagtgacaggaagcatagcggcatacaagatagcaaaccttgcgagtatgcttgtaaaacagcacgccgatgtcaacgtcataatgacacacaatgcaacaaattttataaatccaatcacatttgaaactctcacaggcaacaagtgcctcgtggacacatttgacagaaactttgaattcaacgtggagcatgtggcgctcgcaaagagagcagacatctttatggtggcacctgcatcagccaatgtgataggcaagatggcaaacggaatcgcagacgatatgcttaccaccacaatacttgcagccaaatgtcctaagcttgtttctcctgccatgaacaccaatatgtacgagaacaggattgtgcaggataatatcaaaaagctcgaacactacggctttgagatgataaagccggctgaaggatatcttgcatgcggagacaccggtgcaggaaaaatgccggagccacagacacttttcaactacataatgaggacaatagcctgtgaaaaggatctggcgggcaaaaacgtactcatcacagccggagcgacgcaggaaaaaatagacccggtacgttttatcaccaatcactcaacaggcaagatggggcgtgccatagcagaaaactgtatgctccgcggtgcgcatgttacactggtcaacgcttcagtatcggttgagccacctatgtttgtagatgtggtaaatgtgacatcggccgcagacatggcagacgtggtgaaatcaaaggctgctgaacaggatattatcatcatgaccgcagcagtagcggatttttgcccatcacatccggctgatgagaaaataaagaaaaatgacagctcatatgagtctgtaattgagcttgagcgtacagaggatatcctttcatacctcggagcacacaaggctaatggacagctcatatgcggtttttctatggaaacccagaatatgcttgaaaactcgaaagcaaagcttgcaaagaaaaatgcagacatgatagtggcaaacaacctaaaggtagcaggcgcaggctttggaacagataccaatgtggtcacactcatcacggctgacgactgcacagagcttgaaattatggacaagagctgcgttgcagcaaggattatggaccggttgctgcagatgtagaattactacaccatgcagtccactgtcggcagctccccggtcacatcgaggaagagatttacaaaggtctgctcatagtaaggctccacccagagcaggccgatgccgagcgacaacacgcaaagcacaagcataccgatgaagcttacgttaatgtagatgactctgagtatgttgccacgaatcagttttattgcatgagtcagacatgcaaatactgataaatcatcgcgagagagcaccagatacaggtaaaacggaaacagaaccagtacgataaagctgagcacggcacttgcagcatataaagcgatagcaatttccatagtgtcgccgcttagcttgaaaaagtttctggctacaaggaaaggcgcctttgcaatcatagagatggcataatatatgatgtatgctccaaaatatctgttggagtgattcataaagcagtagaagacatcgctgatacggcactctttctttcttgccatattaaggtggaaacgtatgagtcccatctgcagcacgccgaccacgatagataaaagcacctcggcaatgtagtagatgacggtctgaacctttgtcgcatatacatttccgagcaggtaggtaaacggcaggtcgctaaacagatttatgagtgtgacagtgagaaaaacgctcatgctaagtctgtatcttccgttcaggttctctcttgatattctttttaattctttggatttcttttttgggttcattatatttctcctgaaataatagttttgaattaatgcttaagttaatgtttaaattaatgctttgacaattgtcggatatatagcatatacttgtattcatatggttacacaaaatcacaggaaggaccacacatatcatgcagacagatgaaacaatcgacaggtatttctatataacgggctggatatgcatagctgtatttgcggctcttgcggcagtgattggagtatgcggtacgcagatactcacaaaggtgcctccatgtccgctgcacgcatatacaggatactattgtccggggtgcggtggcacgagagccacatttgcgttgctgcacggacatctgataaggtcgtttgtactccatccgtttgtgccgtatacagccgttttgggcggttggtttatgctgtcacagacactgcagcggataagccgcggcaggctgcatattggaatgcacttcagaccattatatatgtggcttgcacttgccattattgtggtaaactgtatagtcaaaaatatgcttatattattttgcggtattcatctgctgaagtagctcattgtagtcgataccggtcaggttctggtattcctttaatataccctctatgcttccgtattcgtgaagcatggcggcaaacgaaccgatatagataataagagtgataacaacagcggcaaacgcaatccagaatgaggtcatagccatgctgctcattgaggtggcaccgccttttgacagtaacgcaaaaatcatggcaagcgagccacatatgatagacacataaatacagctgcacgacgcgatggcaattattgaaagcacaagtgctgcaacctccatattgcgtgagcgtttattgtagaaattgttgttgggattaaagcccggcccataattgctgccgaaattatagttataatcctgattataatcaaatttttgtggatccataataaaattcctttctataaagttgattttattgtatcacttcatttataatacgaaaagaataagttttttaaagaggtaaaaaaatggatattattgctgcaattgcagaagaactgcagattaaaaaaggacaggccgaggccgctgtcaagctgatagatgagggaaacaccattccttttatcgccagataccgaaaggaggcaaccggctcattaaatgatgaggtgctcagaaatctcttcgacagactgacatatctacgtaatcttgaggacaagaagcagacagtgcttgcaagcattgaggagcagggcaagcttacggatgagcttaagaaggcaatccttgaggcacagacacaggtggcggttgacgatttgtacagaccttaccgtccgaagagaagaacccgtgccacaatcgcaaaggaaaagggcttagagccactggcacagaccattttagcgcaggaatcgtctgttgatatcatggcagaagcagctaaatatgtggatgcagaaaaagacgtggcagatgaagcggctgcacttgccggagcaaaggatatcattgcagagaacgtatcagacaatgccggttacagaacaaaaatcagagagcttaccatgcaaaaggggcgtcttatatcgacagctaaggatccaaaggcggagtctgtctatgagatgtactatgaatttgatgaggctctttccaaggtggcaggtcacagaacactcgcaattaaccgtggtgagaaggaaaaaatcctcacagtaaagatagaggcaccgacagaggatatcataaaatatcttaaaaagcaggttatcacaaatgatggagcgcctacagcagccatactcacagaggtagtggaggatgcgtacgacaggcttattgcccctgccatagagcgtgaaatcagaaacaatctgacagaggaagcagaggatggtgccataaaggtattcggaaagaacctggagcagcttctcatgcagcctccaattgcaggacaggttgtgcttggatgggatccggcattccgtacaggctgcaagatttctgtcgtagaccctacaggaaaggtgctcgataccacagtaatctacccgacggcaccacagaacaaggtcgaggaggcaaaggccgtaatcaaaaagctcatagacaagcatcatgtcacacttatctcacttggaaacggaacagcatcgcgtgagtcagagcaggtgattgtagagctgttaaaggaaattccggtaaaggtgcagtacatcatagtaaatgaagcaggtgcgtcagtatattcagccagcaagcttgccacggaggagtttccgaattttgatgtgggacaaagaagtgccacatccatggcgcgtagacttcaggatccgctcgctgagcttgtaaagattgatccaaagtcaatcggtgtcggacagtatcagcacgatatgaaccagaaaaagctctcagaggcactcggaggagttgtagaggactgcgtaaataaggttggtgtagatttaaatacagcatcagtttcactgcttgagtacatatcaggcatctcaaagaccattgccaaaaacatcgtggactacagagaggaaaacggtaaattcacatcacgttcacagcttcttaaggtagcaaagcttggaccgaaggcatttgaacagtgtgcaggcttcatgcgtatctcagacggaaagaacccgcttgatgccacaggcgtgcatcctgagtcatatgatgccacaaaggcagtgcttgaaaagcttggctacacaatggaggatgtaaagaacagaaatgtagttggaatctcaaagaaggtatctgattacaaggcgctcgcagacgaggcaggagttggtgaaatcacactgcgtgacatcgtaaaagagcttgaaaagccggcaagagacccgcgtgaggatatgccaaagccaattctaagaagcgatgtacttgagatgaaggacctcacaccgggtatggtattaaagggcacagtcagaaatgtaatagatttcggatgctttgtggatataggagtacaccaggacggacttgtgcatatctcagagatatgtgaccgctatatcaagcacccgcttgaggctgtcagtgtaggggacatagtagatgtgcaggttatgagcgttgacctcaaaaagcagcgcatccagcttaccatgaaaatcggacagggcacagacaaggccggtaagtcagaacacagcggcagcggcaaagaaagtgttgccaacaaggctgacagaagtaatagaaataacggcggaaagaatagcagaaacgatagaaatagtacaggcggcaagaataataacaacagaaacaaaaaaccacactacataaagggcaagaaaaacaatttctttgacaatattattcttgataattaaaaacaccttgacaaaacacttcaaagtgcatatcataaatttgtaaaaaaaataggaattcttcagggcagggtgcgattccctaccggtggtacagcccacgagccgcaaggcatgattcggtgtgattccgaagccgacagtatagtctggatgagagaagattattaggtgtcattacactgtgatattaagtcccggaagattttcttccgggattttttaaagcagctattcagattttagatagctgcactcacaatatcctcaggattccttaagcatcaaaggagtgtaaaatggacgtaacaacaaacaacacaaaatcaaaagtaaacatcagacttttagtcggcacaggaatgttaagcggacttgcatttgtacttcagtacctcgagtttccaattccaatcatgccgttttttattaggtttgatttttcagacctgcctgcacttatcggagcatttgcatacggaccgttagcaggagtgattgtagagtttatcaagaacctgcttcactgtacagtaacacagagctttacggtaggagagctttcaaactttattctcggagcagtatttacaggaacggcagggcttatatacaagaagaacaagactaaaaagggtgccatcattggtgcgatagtcggctcagttataatgggaatcatcagcttcccgtcaaacctgtttattgtatatccagcatatgagaagtttacaccaataaatgaaatcatggatgcatacagcaaacttctcccatcagtaggcaagctgtggcaggcacttttaatattcaatgttccgtttaccatcgtaaagggacttatatcaacacttatcacagtgcttatatacaagagactgtcaccggttttaaagggcagaggatagagaaaatacctgacacaatatatattagttataaatataaagagcgcagtcaattgcgctcttttctttttttaaaaggaatgttataataaatccaaatatttagttgggagcaggacatgaagcttgaatttgatgtaaaagttacagaaaaagatttatattcatttaatatagagcaggcgtacaagggcagtcagggtgtcatatcattgctgtttgctgtgctcttggctgcggcagcagtgttaagcgcacaaaaaggcaatacggagtatgtggtgctttatattatagttggtattctggtgctgctatatgtgccgttttcactcaagggcagggtaaagatgattatgaagacaaatgaagttttctcaaagccactgcattttgagatagatgaaaagaacataaaagtaagccagggagaggagatggcgcagcttccgtgggagcaggtgtacagattcgtggcaaatgataagaggatacttatattcagcaacaggaagaatgcatacattctctcaaaggagcagctgggagacagctatgagccgttaaaggagctggcaggcagtacactggagaaatacagactgaaaatcaaataaacaaaatagataaaagataaaataaatagataagggtataagctggtaatatgagtagtgaaggaaatataacagtaatagaaagcttttcggcagatgatacgcatgcacttggggttacgcttggacagcaggcaaagccgggggatgtgtgtacacttgtgggtgatttaggagtgggtaaaacagtgctcacgcagggcatagcagaggggcttggcatcacagagccgataaacagccctacatttaccatagtgcaggtgtacgaggagggcaggctgccgttttatcatttcgatgtatacaggattggtgacattgaggagatggatgaaataggctatgaggattatttctacggagatgggcttacgatgatagagtgggcaaatctcattgaggagatactcccaaagaagagaaaagagattactattgaaaaagacctggaaaagggctttgactatagaaaaataacaataaaagaggttttataatgaagatacttgcgcttgacagctcagggcttgtggccagtgtggctgtcgtatcggacgataatctgataggagaatacacgataaattataaaaagacacattcgcagacacttcttccgatgcttgatgaggtggctaagatgacagagcttgaccttaagactatagattttattgcagtctcagcaggaccgggatcgttcacagggcttcgcataggctctgcgacggcgaaggggcttgcaatggcactggataagcagatagtttctgtacctaccgtagatgcactagcatacaatctgtggggcagtgcagatgttgtgtgtccgcttatggatgcaagaaggcagcagacctatacagggctgtatgattttactgatggcaggatgaataccattttgccacagtgcgtagtgatgatagaagagatagttgaccaaatcaatgagctcggccgcagggtgattttccttggagacggagtggatgtgtttagggattatattaatgagcacgtaaaggtggactatgactttgcgcctgccatgtgcaataagcaaagagcatcggctgtagcatgtctgggacaggtgctctatgagcagggcagggcagaaaatgcagcagaccataagcctgagtatctcagattatcacaggcggagagagagagacaggaaaaggagagagattttagaatatgataataagacccatggagccggaggatgcagactcggtggcgcagatagaaaaagacagcttcacacagccctggagcagacagggatttttggatgccatgaggcttccggagaatatcatgcttgtggcacaggaggatggcgagatactggggtatcagtgcacatatgtgtcatttgatgagggagagctgaccaatatagcagtcaaaaaatcagcacgaggaaaaggtgtgggtgcacatcttatcagatgcttgcaggaaaaggcaaaagagtcaggtgttgagcgcattgtgctcgaagccagggtgactaatgaggctgcgatatcactgtatcagaagatggggtttgtaaaccttggaatcagaaaaaatctatatgagcatccggtagaggacggtgtcatcatgtcctatactgcggaggaaaatttatgttagacgtgtgtttacttggaacagcaggcatgatgcctttgccaaacagatggcttacggcactttcgctaaaatataacggcagcaatatacttattgactgcggtgagggaacgcagattgcgatgaaggaggccggaatcaatttcaagccgatagatattttatgcatcacccactttcatgcagaccatatcagcggattgccggggcttcttcttacaatgggaaatgccgagcgcaccgagccgcttaccattattggacctaaagggcttacaagggttgtcactgcacttcggacgattgcgccggagctgccttttgagataaaatgcatagagctcaatgagcaggatgaatattttgagatgaacggatatcatatccatgcattccgcgtaaagcatgcggtgctgtgctatggctattcggttgagataaagcgtagtggcagattttccgtggaaagagcaaaggaaaaagaaattccgatgcgcctgtggaatcctcttcagaaaggcaataccgttgaatttgagggcagagtgtatactccggatatggtgcttggaccggcaagaaagggcataaaggtcacatattgtacggactcaaggccacttgagcacatagtggaggcagcagagggatcagacctttttatctgcgagggcatgtatgctgaaaaggaaaagatagtaaaagcaaagcagtataagcatatgaccttttacgaggcagcagacatggcaaagagagccggcgtgaaggagctgtggcttacacatttttcgccgtcacttgtccgtgcagaggattatatgccacaggtgagggatatttttgcaaacgcatatcttggaaaggacgcaaagagtgtggagctcatgtttgacgaggattaaggaggggcgatatgaagaaaacaggtatagttattttaacaatagcgctgattgctgcgatatgtggttcgttttatgtcgtaaacgacaagtctaaaagggctaatcaaaaggaaaaggtactgaccgaggtacaaagaataacaactaaggatctcgacaagaactatccgcagacacctcgtgaggtggtgaagctttataacaggattgtgaagtgctactatggtatgcagtatagcgatgaagagcttgatgcactcaccgaccaggcgcttaagctttttgatgacgagcttgcagcaaacaatccaaaggatacctacaaacagtctgtcacggcagatgcgcaaagctacaaggaacagggcattacacttgctcagaccggagtgtgtgacagcaatgatgtaaaatatgtcaccgataatggtagtaaaattgcatatgttaaggcgtcttacttcatgaaggagggcagctcgtattctaagacatatcaggaatatgtactcaggcaggataaggaaggctgttggaggattcttacattttataagattgcggcagattctgatacggaaacggaatagagtaatataattaagattggtgtaataaaatgacagaaaatacagaaacaaaaaaagaaattaaaatacttgcaatcgaaagctcatgcgacgagactgcggcagcagtcgtagtaaatggacgtgatctgcgaagtaatgtgatttcatcgcagatagctcttcatactttatatggaggggtagttccggagatagcttccagaaagcatattgagaaaattaatcaggtcatagagcaggcactttcagatgcacatatgacactcgacgatatagacgcaataggagtcacatatggtccggggcttgtaggagcactgcttgtaggcgtggcagaagcaaaggccatagcatatgcaagaaacattcctcttgtcggagtgcaccatatagagggacatatcagcgcaaattatatagaaaataaagacttagagccaccatttctggcactcgtcgtatcaggaggacacacacatctggtgagagtggtagattacggcaaatatgagatcctcggacgtacgagggatgatgcggcaggagaggcctttgacaaggtagcgagagcaataggacttggctatccgggcggtcctaagatagaaaaggtttcacatgagggagatccgcacagcatagagttcccgagagcaaagattgtgggcggagtttatgatttcagctttagcgggcttaaatcagcagtactcaattatttaaacggctgcaggatgaagggactggaaataaaccaggcagacgtggcagcatcgttccaacaggcggttacagatgtgcttgtcggacacgctgagaatgccatagatgagtttaaaatggacaaatttgccattgcgggaggcgttgcttctaatggtgttatccgtcatgcgatggaggaaatgtgcgcgcgcaagggtgttaaattctatcgtccgtcaccgatactgtgtacagacaatgctgctatgataggtgcggcagcatactatgattttatagcaggcaagaggtctgggcttgatctgaatgcggttccgaatctaaagcttggtgaatgattctgtaattgcttccggttacaccggggtgcaaacataatgtgcagatttatcatggataggaaaataaaggaatatggataagaagaaatacacagcaatcatactgtcagccggtacaggaagccggatgaaaagtaatatgccaaagcagtatatggagcttttggggcagcctgtgatttattatagtgtaaaagcatttgaggatagtccggtggatgaaatagtcatagtctgcagtgcagattatattgagtatttcagacattcgataattgaaaaatatggctttaagaaggtgaaagcaatagtgcaggggggcaaagagcgctacaactctgtatatgaggggcttaaagcagcaaacggcacggactatgtgctgatccatgacggcgcacgccctctggtggataatgaaataatagttcgttctatgcatacggttgaaaaagaaaaagcatgcgtagcaggaatgcctgtaaaggacacaataaaggtgtcagatgaattgggatattcagcaaatactcctgacaggaaaagcctgtggcagattcagacaccgcaatgctttgaatatgatttgctggctcagtcctatgataagctgtttagtgacatgtcatatgggaaaaatgtgccggcaattacggatgatgcaatgatagtagagtatgggagtgacacaaaagtaaagctcatagagggctcgtatgaaaatataaaggtcacaactcctgaagatatggggattgcagaactttttttaaagaaacgcagaaaaatgtaaaaaaaatagaaattagtgttgacatattgtaacattgatgataatataaattctgcgctgaacaagtgcagacaactaaacaattaagtattaattgtgacacgcaggggtatcgaagtggtcataacgaggcggtcttgaaaaccgtttgtccgcaagggcgcgtgggttcgaatcccaccccctgcgctttcttttgccttaaaacagatatgcaaaagaaaacaaaaaagttcttgacaaatgaaaaacattttgatagaataaacaagctgtcgcaagacagagaacttaaaacaaagttcaaaaaaataaaaaagtgcttgacaaacgaacagcgatttgataaaataatcaagctgtcgcaagagagcaaaacaaagaacattgataactgaacagtgagaaaccttgaaagattttgagaatcaatcagaacgcttcaatgaaaattgaagacctttaaaacagtaaattcagatttatctgaatgaacgaattagccaagtttaacttgactgagatcaacttttaacatgagagtttgatcctggctcaggatgaacgctggcggcgtgcttaacacatgcaagtcgaacgaagcactttatttgatttccttcgggactgattattttgtgactgagtggcggacgggtgagtaacgcgtgggtaacctgccttgtacagggggataacagttggaaacggctgctaataccgcataagcgcacggcatcgcatgatgcagtgtgaaaaactccggtggtataagatggacccgcgttggattagctagttggtgaggtaacggcccaccaaggcgacgatccatagccgacctgagagggtgaccggccacattgggactgagacacggcccaaactcctacgggaggcagcagtggggaatattgcacaatgggcgaaagcctgatgcagcgacgccgcgtgagcgaagaagtatttcggtatgtaaagctctatcagcagggaagataatgacggtacctgactaagaagcaccggctaaatacgtgccagcagccgcggtaatacgtatggtgcaagcgttatccggatttactgggtgtaaagggagcgcaggcggtgcggcaagtctgatgtgaaagcccggggctcaaccccggtactgcattggaaactgtcgtactagagtgtcggaggggtaagcggaattcctagtgtagcggtgaaatgcgtagatattaggaggaacaccagtggcgaaggcggcttactggacgataactgacgctgaggctcgaaagcgtggggagcaaacaggattagataccctggtagtccacgccgtaaacgatgaatactaggtgttgggaagcattgcttctcggtgccgtcgcaaacgcagtaagtattccacctggggagtacgttcgcaagaatgaaactcaaaggaattgacggggacccgcacaagcggtggagcatgtggtttaattcgaagcaacgcgaagaaccttaccaagtcttgacatccttctgaccggtacttaatcgtaccttctcttcggagcaggagtgacaggtggtgcatggttgtcgtcagctcgtgtcgtgagatgttgggttaagtcccgcaacgagcgcaacccttatctttagtagccagcggttaggccgggcactctagagagactgccagggataacctggaggaaggcggggatgacgtcaaatcatcatgccccttatgacttgggctacacacgtgctacaatggcgtaaacaaagggaagcaaagctgtgaagccgagcaaatctcaaaaataacgtctcagttcggactgtagtctgcaacccgactacacgaagctggaatcgctagtaatcgcagatcagaatgctgcggtgaatacgttcccgggtcttgtacacaccgcccgtcacaccatgggagttgggaatgcccgaagccagtgacctaaccgaaaggaaggagctgtcgaaggcaggctcgataactggggtgaagtcgtaacaaggtagccgtatcggaaggtgcggctggatcacctcctttctaaggaaatcgagtagagagtttttcactgttgagttatcaatagataacagcatatttttggtggcgatgcgtttttgggaaacacccgttctcatcccgaacacgatggttaagacttaaacggccgatgatactatactggtaacggtatgggaaagtaggtggctgccaaattacaacgggggcgtagctcagttgggagagcacctgccttgcaagcagggggtcaagagttcgaatctctccgtctccatcgtcgatgtgataaaacagttacaatcgacattgtaccttgaaaacttcatacaaatgatttgatgaataaatattctattcttaagaatatctaacaatcaagacatccgagaaacaaaaccaagttgtgaacaacaacaaagttctttaagttattaatgatgcaacgctatgcatcgaagagattaagcaaagaagagcgcagggtggatgccttggcactaagagccgaagaaagacgtgataagctgcgaaaagctgcggggagatgcaaataatccttgatccgcagatgtctgaatggggaaacccggtacgaagaactcgtatcatccatacgccaatccataacgtatggaggggaacccggtgaactgaaacatctaagtagccggaggaagagaaagaaacatcgattttgttagtagcggcgagcgaaagcgaaagaggccaaaccggagtgcgtgcactccggggttcggaccgcatttaagattcagtgattctagcagaaaggtttgggaaagcctgccggagagggtgaaagccccgtaagcgaaaggaaagctgactgagcgggatccagagtacatcgagacacgagaaaccttgatggaatgagcggggaccaccccgtaagcctaaatactacttagtgaccgatagcgcatagtactgtgaaggaaaggtgaaaaggaccccgggaggggagtgaaagagaacctgaaaccctgtgtttacaagctgtggaagttctttaaatgaacaaccgcgtactttttgtagaacggtccggcgagttgcggatactggcaaggttaagcacttaaggtgcggagccgaagggataccaagtcttaacagggcgttaagtcagtatacgcagacccgaaaccgggtgatctatccatgtccaggttgaagttgtcgtaaaagacaatggaggaccgaagccacatccgttgaaaagggtgggcatgaggtgtggataggggagaaattccaatcgaacccggagatagctggttctcctcgaaatagctttagggctagcctcgatttagtcttatggaggtagagcactgaatttccgcgggggcgtcaaagcttaccaaagaatatcaaactccgaatgccatgtagatgatgatcgggagtcagactgcacgagataagttgggcagtcaaaagggaaagagcccagaccaccggctaaggtcccaaagtgcgtgttaagtggaaaaggatgtgggaattcgaagacaactaggatgttggctcagaagcagccatacattcaaagagtgcgtaacagctcactagtcgagagttcctgcgccgaaaatgtccggggctgaaacacgacaccgaagccgtggactcgcaatgcgagtggtagaggagcattcttaaaaccgacgaagctgtaccgaaaggagcagtggagggataagaagagagaatgccggaatgagtagcgagagaaaggtgggaatcctttcggccgaatatctaaggtttccagagtaaagctgatctgctctgggtaagtcggggcctaagcacaggtcgcaagacgtaagcgatggataacaggtttagattcctgtaccacgcattatcagaactgtagggacgcatgtggaaagcacgagccgggaatggaaaaaccggtacaagcgaggtaggtgtacaacaggcaaatccgttgtataatccgaagacgtgatgtggagcgaaataaagtagtgaagcgtgtgagccatgtgccgagaaaagctgctattgtgtaatgcgtgcccgtaccgtaaaccgacacaggtggatgaggagagaatcctaaggccgacggaagaagcattgttaaggaattcggcaaaatgaccccgtaacttcgggagaaggggtgcctgcgagagcaggccgcagagaataggctcaagcaactgtttagcaaaaacacaggtctatgcgaaaccgaaaggtgaagtatatgggctgacgcctgcccggtgctggaaggttaagaggagaggttagcgtaagcgaagctttgaatttaagccccagtaaacggcggccgtaactataacggtcctaaggtagcgaaattccttgtcgggtaagttccgacccgcacgaaaggcgtaatgatttgagcactgtctcgacaatgcatccggtgaaattgaagtaccagtgaagatgctggttacccgcgccaggacggaaagaccccatggagctttactccagtttgatactgggattcggtactgcatgtacaggataggtgggagacgaagaaggatggacgccagtctgtccggagtcgctgttgggataccacccctgtagtactgggtttctaaccagttgccatgaactggcaatgggacaatgtcaggcggggagtttgactggggcggtcgcctccgaaagggtatcggaggcgctcaaaggttccctcagaatggttggaaaccatttgaagagtgcaaaggcagaagggagcttgactgcgacaccgacgggtggagcaggtacgaaagtaggacttagtgatccggtggtataaagtgggattgccatcgctcaacggataaaagctaccctggggataacaggcttatcactcccaagagttcacatcgacggagtggtttggcacctcgatgtcggctcatcgcatcctggggctgtagcaggtcccaagggttgggctgttcgcccattaaagcggtacgcgagctgggttcagaacgtcgtgagacagttcggtccctatccggcgcgggcggaggatatttgagaggagctgtccttagtacgagaggaccgggatggacggaccactggtgtatctgttgtcgaccaacggcatggcagagtagccaagtctggaagggataaacgctgaaggcatctaagcgtgaagcccccctcaagatgagatatccctccttcgggagtaagaccccttgaagactacaaggtagatagggcagaggtggaagcatggcaacatgtggagctgactgttactaataggtcgagggcttaatctggttaataacggagaaaaacaaatcggatttgtatgaagttttgaaggtacagaccttaataatcctcgatagctcaatggtagagcactcggctgttaaccgagttgttgtaggttcgagccctactcggggagttttctttttcttaggctccatggtcaagcggttaagacatcgccctttcacggcggtaacacgggttcaaatcccgttggagtcatttttagcacagcaatgcgctgagttaaaagtcataagtcgtatgccgatgtggctcaattggcagagcagctgatttgtaatcagcaggttatcggttcgagtccgatcatcggcttatatatttggaccattagctcagttggttagagcaaccggctcataaccggtcggtcctgggttcgagtccccgatggtccattaaattttttcttgcatttttgtgcaaactgtgatattatatatcacgcattaagcatttggcctagtggctcagttggttagagcgccgccctgtcacggcggaggtcacgggttcgagtcccgtctgggtcgtttgtagtgagtatctactacaattttatatgggatcttagctcagctgggagagcatctgccttacaagcagagggtcacaggttcgagccctgtaggtcccattcatgccgcagtggcggaactggcagacgcgcaggacttaaaatcctgttgtagtgatacagtaccggttcgattccggtctgcggcattcattcaaaacacttgacaagagtgttataatgaatgagtaaataaaatatgtgtgtgtagctcagctggatagagcacttggctacggaccaaggtgtcgggggttcgaatcctctcacgcacgttatatagtatagaaagagcaggttgtaatacctgctctttctatactacaaatcgtccgcggacgattcgaaccccagggttcgttctacacttcgttgcggtcggcgctaagcggaagtccaccggacttccagcgccctctcacgcacgttatatagtatagaaagagcaggttgtaatacctgctctttctatattacaaatcgtccgcggacgatttgaaccccagggttcgttctacacttcgtttcgccactatcttaatgtaagtgctcaaatgatacagaaatggattgatgagagtatgagtgttgtgaattaacaagtaataaataaccatgaagctgccagaagatatgattgactggcagcttttttcatattggctatgtataaaatactttcgtatatatagaaagaaggcatcataaactggctgaatgctcatgaagctgagtcttggtgcgtgcttgatgatgagatttttccggattatgagcagttgcaaatcgtggaaaagttagttaagacatgttacatggatggactgacggatgactatgttaacgaagttattatgaaattgacagatgatttcatggattaactatgagccaaggagtctgaaagaaattgcagaaaactatcaaaatataaaataatagtggacgaatttgataatattgatttattggtagataagttatttggagatgctttgcaataattttatttatatctcaacataaaaattgtaatttcaagtgatggaggtatgttaagtgcatatccaataaaatagtatatagaaagggaaaatatatggacgtattaaataaatttttacaagcagaaataaattcgaaagaggattatgagagcattataaattttattaatttatatgagataagaaaaggtgaatttgaaggaaatgagtatgttattatgaagatggatagggataactttataatattctctgagtatgatgatggggaaggtggtatacagatacccttttcactatcaatttataaaaaaagcttgttggatgcaattaatagttatgctcaagagaaaggtgttatttaattagggttatacttgccataagttcgtattttcacaccaaaaagtttgtatacaaaacagggttgtgattgcgtggcgtggagccgcaagcgcaggactggtttcatcagcagacagggcggatatgaaagcccccgtccctcgtttttcaagattttcttgcaattaagttttacttcaagatggattatgacattcacagacaggctactaacaattttattgctatattacatctgtatgaatctgtatgaataaagaaaatatattgacaaaaatgtgcaaattcaataaaattattaaccataagggcacacttatggaaacgtaaggtcgcaaagccagagtctaaaacagttacatgtagtaatgacagttcggctgcaacaaccggtgaataccggttgctgcagcctttttgtatgtatgaaaagtttattgaagtatgaggtgaaaagatatgaatgaaaaatttgattttctgccacttgggagcattgtagtagtaagcggtggcataaaaaaatttgtgattgttgcaagagcactgcaggtaaatataaatggctgtaaacagttctttgattatgctgcctgcccatatcctgagggaatgaatggtgacaggcttatgtattttcagcatacagatatcagcagggttgtgtttgaagggtatgtagatgatgatgagataatgatgtgtgacaacatctttaatgccatggagaaaacagaaatagagcgcgcagatgtaagaaaactcaaaagaagcatggtgaactgatatggcaaaaaagaatgacagaaaagaatacaataaactgaagaaaaagaaagctgacaataaaaaacagcaggaacagtgccagtcagagatagatgtgcttgatgaaaaaatagagaggctgaaagcggcatacaggaagctggatgatgccaaggaggctattgatgatatcaagcataaccagaggaatatgataaattcagatctttatcagtgcatgtggacaggcagcaatgcacaggaatgttatgattcatgtgagagcggaaatttatatacagcatatgacggatatgtgtcaaatatagatgcagcggaggatgccatcaactgggaaataaatacactaaaagaaaaaatgaatgaaaaatatggtgtgctttcaggacttgttaacgcatgggatgatctgtgcacgaaaatacagaattttttcaattaataaaagggagaggagaaatacgaagatggaaatcagccttgataatatgcaggtatcttttatgactgccggtataaaaacagcttctgattccgtaagtctcacagcggcagagacagaaatcaaaagcagatctgaagcaatggacaaatttcaggaagaatacaggcagctgaaagcctttgtgaaagattacagagatacgttaaataatgatctggcaaaaatagaactgataataaatgcaataaatgaaaatgacagaaaacagggagattatattaaaaatggtattggactatcagatacagctgtgataccataaaacgaggagatgaaaatggaagggtttcagataaattatacggatctcagtgatctgttctgggaatataagcgaaaaattgaaaatctaattgaaaatattgataactgcatagaaagaatcaatatgtttacggaaaatgcagtatttacaggaaaaaccggagacgcagtaaagagttatcttggtgaagcacatataacaatcctgtcaggcattaaagtaactgcacagacactgcttgacaatatggcagcatacaaggatggataccgtgccattgatagctcgacgaacttcaaactggatgaagaagcaatacaggaattcaggaaaaagctggcatcaaactatgaggatactgatgagtatatgggcaaaataagaagtgcactttcagaagtatcggacatatctgatgtgggcatgccggacagtaacggagtatttgatatccatgagcagatggacagcgaccttataaagcttgtctcaaatgtaaacagctacgagagggaaaatgtggtacggcttgaaaattcagtagagctgcttctggaaaatctgcagtcatgtttttcaaaaataggccttagccagggtgcgattgagagctataaaacaggcagttttatcacagataaagacgcaggtgccctgaacacgggcattaaaatatttggagacctgcatgagaagaataaagaagcatacgatgaaatctatgagacagaacagaagataaaggatgaagccgaaaagagaaagacacagggaatctggaggacggttggaggagcagtactaattgcgacgggggtagcatgcatagtgctgacaggaggtgctgcaataccaatagtagctgacgttgcagtagccgtaggaagcggaacagcagtattcggagctgcagatgccatagagggcactcaggatatttattatggaagcacaggtgacattgacagcacggcagtaaacggcataaaggatgacctgtttcagggaaacgaggacgcatattatctgacagaaaatgcctttgcatttgcggcatccgcaatgattccaatcggacaggcatccacagcgggaaatctgacattcaaaagcacagcaacaatagtcgccaaagaaggcatctcaatgggagccggagccggtgcgcagaagataaccacagatgtgacaggaaatgatacagcaggaatggttgccggtatggttgcaagtggagtaactgcaaaggggctgaatggaattgaagcagaggcgaacaagctggcgaaagctccaaaagggattgatggagtaaccgagggagctggaaatttagcggaagatgtggggaaagccggaaaagggctcgagggagcagccaagggagccgagagtgcagcggaagatgctgggaaggttgttgagagtggtaaaaagactattatatctactttaggaaatgaaatagatattacaccgtccttaaagcatacttcagtcaataaaaatccaggaccatatggtgaagtgaatacatcggtggacatattagacgcagagggaaatataaaaactagacgatggtatgattctgagggtaaagcatatagagatgttgatatgagtgaccatggaaatcccaaagaacatccagaagtcccacatgaacatacatgggaatataacaatggaaaaccaaaaagaaattaaggagaagagatgaaaggttgtataataaaaaatgatgagatttctataaaagatatttgcaatattattggagatgtggacaactataattggcttattacaaatattgaatgttatccaagtgacgaagagatagtaaaaattttggataatgaatactgttggattgaaggaagaagcttgttagatttactagctaaagaggagttccaatggatatggggggtcttctctgctttccctaaagaaataagacttgaagaagtattaaaatatgattatccgtatgctgatggatataaaggattttgggaaaatccaatagcattgcaacatccattagcagtttcagaaattgtggtttgggatggttcattaatattagtaatatcgaaaaagagtgaagttgttaatgctcttatcgaaaacaatacatttgcacaggatttagaaaaatataatatggaataattttaattatggttatactttcagacatctaatagcatcactacaacccatgcatatctattaattaaccatcatggttgcccaaaagcaattaagtatccatggtgttataaatgacactaaaactttgttgagttaggcatacgaatgaatattgcaaaatgaatatgttgatgtaacgcacttttagcaacagaatgttgcaaaagggtgcgtgtttctgtgaaagttttactataaacgataagggcttttttataaattcgggagtagctaataatggtatgaaaatagatatgtttttagatcaaagtggtaaaattatttcagcatttccggaggaatagaaatgaaatacagaatagaagaatataaattaaaaaatggtattgaggatataagtatcatatttgatgagaaatatcagttgttgacaacttttatgtcatgcgatgtattgccctttgaaaaatggattaaatcaggttttgatagagtactgtcagggaaaagtgaatatgaagaagtaaatggaaatgtatgttgtgcggaaataagtcctaaaacgactaaagtatatgataatctggcagaggatgctatggggaattggtgtgaagttgatacaaaagaacttcgtcaattaattgatgagtggtgtgataaagttcaaaaatttaaaatgagcatcacaactaagcctcccaccggcaggcttaattcgtagtctcactaccatatattaacagaatttcttaggttcataagtcttatcatcccgaaatacggcgtagattatggtggtaaactgaccgaagcgaatgtccgatttgtttcccttcaggagaaacaatggaagcttcgtgatgatttttaccaatatcaattccgataatgtacataagaaaactccttttgtgtaaatggtatgtaacaggtagaatcctcgcttcaatgcgggttacaatctggttagatatacgaagtacagcacatatgcggccaacatccagctaatacgcaaaatcctgcaaagcagagggagcagtctcaatgaacgaagtcacaagtgcttcaagagtggtgacgcacacctctatctattacaggataattgtgaaataggaataaaagaaaagcaatagatagaaaaagactgctttgattcctatgtgtttagcataccagagtggtagtgaatctgtaaggtattcaccaatcaatccatgtaatgaaatcagccaagaagtagcagaatcttttaatggtgcaacatttacaaaaacaacattgacagaggatacagttatgtatagagtaagtggtggtaatgcaggaaaagttgggtcatatgtatcaagaacatctcaaggtggaggattgcaatcacagttggatttggcattaaatccttcttggggaaatacaactgaaaatattacaaaagttgttgttccaaaagaaaccacgatttatgaaggtgtcgctgcaccacagaacatttatgacagtcttggaaatacaataggtgtattaccgggaggtgggaatcaagtatatattccaaaagtggaagcggggtggtttaaatgataaaatgtgaatgtagcgaacgaataggaagtgtgattaattcgtaccaattatatgaagaaattaaaatgttttttgaagaacaagttaaagaaggcaggttttcagaagtaccggtagaaaaaccgtattgtaatgggtttgagtggaaagctgacaaatggtacaagtgtatttgctgtggatgtctttgggaatttaaagatcctgatttcccagcaaaaggttttgtccgtaagtttgctgatggaatatatcaccagaaggagatagggaaacatgaatattaatgaaccaattagtaatcctaaattagtcagtgcaattgaaggattaagtaacaataatgcaacacaacagaagttttttgaagaattagcacaagctaaattattgtgtcctgcagatattcaattacagaatagtaccagagatggtaaagaaatagttgtgggagaagggtcttcaatatctgtaaagcatatcgaagacacagaaggtaataagtttttaatggcatttactgactggaaagaattatataaatggaattcatccaaagaacagcaaacggttatttttggttataaggattttcagagcatcatgaaggaagcgagagatgtatattcaggaattgtaataaatccttttggtgcaaatattgtgattacgcttccaatgcttgatggtttggaaaatgattgcataattaaaaaagaagaacaggtgcttataggtattccagctgaatatccaactgaattgattaataatctatgtatatattttgataaggaaaaaagcgttgataaggcattcttattatggatggtaagaggcgaagagggaagctatttactaatattggattcaaaagaagatcctaatattctatatccaagaattggaaatttctgcagtagatttctaaaagataagatgttagatatagtttcagtgaattctgattttggaaagaatgtaattaaagaacacaaatcattttatgaaagagattaattcaattatggttatactttcggactccaaacagcctacaactcctgcacgtctattaattaatcatcatggcggtttcgaagtaattaagaattcatgatgttaattaatagacactagcgaaattttgccaagttgtgtatacgaacgaagattgcaaaataaatatactgacataacgcactccaagcacataatgttgctaagggtgcgtttattgtacctgttaagtggaattatatgtcatccgtcacgaaaatcgtgtcgtttgtcggatttttgtgagtaagagacaaaaatgagtataataatccttatgaatacagatcagggactgttatgcttggaaaagaaggtgtatcaactctggcaggatatggagcatctaacctggtatatgataaaacaaacaaccaaacacttggaatgatagccggaatactggcatcgacgggatcagcaaaaggactgaatatggcagatgcaaaattgggctggtcaaacaaaggtgtgaaaggtaatgttgttgagagtgtaacagggaatatagagaccagagtggtagtaaggctgatgtattagctcagaatagggcaaatggaaatgttgtaataaatgaatataaatcatcattgacagcaccgctaacaagtaatcaaaaaattgcatttcctgagatttttgaaagtggagcaactgttgttggaaaaggaaaaggtatattctctggaggataccagattccgccaggtacaaaagtaacaataattcgaccagagtaggaggtattatgtcgatagttgataataaaacagtagatggcatagcgttaacggatgataataatggaataattttactgatagctgaccatatggactggagagatgaatatcagcatttagtaatgttgcaagaaaagattaatgtatatatcacctttcttgaacagaagcagtatgaagatatctacaaaggagaaaatataacatatggaattatagaaattcatttcttatataatttaaccgctaatgcagaaaagtttttacagtcagttcaaaatcaagttgctgaacttggtgtaaagatacaatattgtgtttcgcaggagggagcagatgaagctagataaaaaccaacaaaagcaattaattaatgcaatatatatcttcagatagaagaggatataaaacaaaaacaaatatcatttatagtgtaaaggataatgcatttattcattgtgattttcttgttgtaaattcgcagaaaattatatatgtctttttgactatctttttatatcttcttaaatgtccgcaaagccttattttatcggctctacgggcattttgcttttgtggtaaacctcacatatctaggtctatcttcttatattttcgctatcaagcgtggttaaaatcgtggtaaatactttttatgcaattagacgctgaacctctgattttgcagtatctatggacgcatgagcataccagttcattgtgatactgatatttgaatgccccatgatatactgtaaatctttcgggttcatgttcttgcttgccagccttgtgcagaacgtatgacgtagcgtatgcggtgtgatatgtggcaaggggttatccttatggtgcttgttgtatttccttaccatacggacaaataaagtgctgtaatcaatcgcaactttgggcttgcccttatgattgacaaatagaaagttgctccgtccgtctatcacaaatggttctgcctttgggcgtttcttcataacccgttgaaatgcttgtatcgtttccttgcttaatggcacttgccttgttccgctctttgtcttaggcgtttcaatatagtagccctgttccttgctctttaataactggtggtcgataatcacaacttcattcttgaaatcaatatcggctactgtcagtccgcacagttccgagatacgaagtccagtctttaacagtatcagcacatcatcataatacttgtgatacacattgtccgtcttgatgaatgagagtagggcttgttcttgctcctctgtcaatgccactttctctttggtatcattttctaggacttcacttaacttgaaatcaaagggatttttccttacataatcgtcttgtatggcgatatagaatgacgcttttaacgagcgtttatggttgttaatggtattgtaggaaaagcctttgtctttcatgcgtaacgcccattccttagcgtcagagggttttatcatatcaatgctcctagcacctaacttatcctctttcaataaccgcatgagttgttcccgttgttttattgtgcttttcttcacgtttgccctctgtgcgttctgtttggcgtagagttggcaaagcgtcattttcttgcctgtgctgtcgataccgtcctcaatatcccgtcttatctgctgttccagttcacgaagtgagggtttttcccgttttccctttggtgtcgggtctgtgggtgtcaatctccaagcatacacatattttgtgtttccaaatgcgtctacatatttatataagtattttccgtctgttcgttggctctctccagtatgcaggatacgtcctttgctatcccgtcttttttctttcatggtgtctgctcctttccttgttggaaagagccttgatatgacttgtgttcatcataacacatacaaggctcatttgcattagattgcgtccaatttatcaataaccttttcaaactgtcggcgtttaatctgtatgcggttgccattcataatgagccagccagcgtccttattttcctctgccaatcgtcttaacttgttttctccgatacggaaatacttagacgcttcttcaatggtaagggtgtatttttcctatacgggaatatcgttgttattcatcagataccccctttcccatgtttcgtgtcatactggatataggggataaggtcggtgcggtttatcctctgtaagtgggcggttaatttactggaaagggaattgctgtatcttgccttatcaagcatagttcccactttttccagtccacctaatgcgtcatgttcttccaagaaataaaaacttttgacagcggaaatcacgccaccctctgtaagccattgctgtgtttcctcaagagaattatgtagtttcggtacttgcagttttaagacttccacagcccctaaaaagcgttcccaaaaccgacatgttttccatctgctcttattactttcatttctgtttggtacgacaaagcgtaggttgtttgccaatagcccgaaagccagttctcccagttccaacggtctgtccttgaatgtcatggcaaaggcatgagccttatcatcacgcagttgcatttctgtccgtttccaactgccgacttcatcaagcgtcttattatgttttgaacagacttccttatccttgtcataaaagcggtaggacaatcccgatttaccagcaccgatataaacagtctttgcggtgtcgaaatcgtcaaacttgctttcgtcaaagtggtagccctcactattagaaataaattcctctttttcgcatttcttctttatctgctctatggtaaagaatggcttttcgtttttatcatcaatggcaatatcaagccttgtgaaatggaagttatccagtccgtatcttcgctcacaacgtcggaacatatccccaaaggtataattcctactgtcgagaatacggaaaatatcatcacaacctctgccagtcataacaagataacagcctaacccttgtgggttatcctctgtttttcttgcgtcccccgatacataaatatctccaatctgccagcgtgcttgataggttttgtatttaatgcttgccggatagacattgaaaatgtcagtcggtaaacctaaaatgtgcatgatgacatcttcggcggttgcagtatcaaatacaatgctgatgtaatcaatcttaacggataaatttttgtgtgtagttatagtgcattgctcctttcgtatgccccattttttgcggggtaaaaattgtgttttgtcctttatttatcacagtttctaggtactatgacatgtatgcgcagggcggtgttacatatacgccctttacgaacgcctaaaggcgttccctttcttcctgtgtctgccccgttcttaacgctcacgagccttgtaaggctcgtggctaaacggaacagccccagtcagaaaccttattttcggtctgatagtccatgcttattcatgctatcaaagtgaaaatatatattttatatgcttactcaagcgtgtgattgaccctagcgtgcttaatcactctgtctaatacgataataactccattagaattacttgtcaagaagtttttgttgacttttagatatagattaagtatgatatgcttataaataccaagaaaagcaacgaaaggagcggttatactaagttatggagcattatgaaaagaaaatcagtttcttaggagaaaacatacagaccataagaaaacacagaggaatgaaacaacaggaacttgcggacaaaatcggtatcaatatgcagagcctttccaagattgaacgtggcgtgaattatcctacctttgatacgttagagaagataatggacgtgctgggtgtaacgcccaatgaattattgtcgggagaatggaagtatattgaccacaccgagccctatatcatggatattatcaaacgggaacaagacttcaatgtttccttagattacctgtctgaaaatgaatttttcgatgatgaaaaagaatgcacattttacaaggcatataaactcatacagtatatccataactacattaccaatgaggttacggagttggaagaacttatggaaatcaagcagttgatacagcgtcaaaaactggaacgcatgataaaagtgcataaggaaatgcgagggttagaccgatacagagaacagcccaaagagtataaataccatgacccttatgatgattggatatttcgtcagcttgcggatatagacaacagaaacaacattcccgacacttctccacaagtagacttcaatgaagcagactatgaagattatctaaaggcgaaatggaacagaggtctttaatttcctcttgcatggaagatacagcaaacaaaaagcccagtaaagagtgcaaagcaccaccaatggtggcaaggctcttgacagggctttttcttttctgttgtggggtaatcaagaggaagaaagaaaaagtgtgcatttttgttccataaatgctaagggtatgctgatttttattgtggcggatatatggaactgttataatatggatatgaagaaagcgacaaatttgaaagtgttaataattttcaaacagcctcattgcatggaaataagaaacagactatccttaaagtaggaggtggcacaaatggcaaatgaagataaaaaagattttaatgctatgttgcatgatagtaaggatatgccaaaatttcaaattatcatagaccagaaaagtattgagaaatatggtggaaacaaaatgtattttgctcccccgattgactatgacaaagtaatgaaaaaagttccgtatggtaaagtgattacggttggaaaaatacgagaacactttgcaaaattgagtggtgcagattttacagagccgattacagcgggtatatttgtttctattgtagcgtgggcgagttatcagcgttccgaagatgaaacaccctattggagaacattaaaagcaaacggagaattaaatgctaaatatccaaatggtattgaagcacagaaagaaaaattagaagcagagggacataccattattcaaaaggggcgtaaaaatatacgatactatgtaaaggactatgaaaattctctttttgatttgaaataggcaaattctatttcacaatttcatatctctatacacaaagcagttagtcttaggattgactgcttttttcatacctaaatttcagattggagtgatgaaatggtgtttgttagagctgttcactaagattatcggtgcataaaattttattgtggtgcagatatgaaaatgatataatgtggatatgaagaaacggacaaactagaatttgtcgagctggttagttcgagataattttgagtttgttaagatgtggtgcacttgatggaatcacaggtacgacatcatattatggaggatgaaatagatgataggtttgattgttgcgaggtcaaagaataatgttataggcaagaatggtaatataccatggaaaataaagggagaacaaaagcaatttagagagttaacaacgggtaatgtggttattatggggcgaaagtcttatgaagaaatcggtcatccgttgcctaatagaatgaatattgttgtttccaccacaacagagtatcaaggagataatttagtttcagttaaatcattagaagatgcattattattggctaaaggacgagatgtatacatatctggtggatatggactatttaaggaagctttgcaaatagtagataaaatgtatatcacagaagtagatttaaatattgaagatggagatacattctttccagaatttgatatcaatgattttgaagttttgataggggaaacacttggtgaggaagtgaaatatacgagaacattttatgtaaggaaaaatgaattgagtagattttggatttagggtgttttcataaatatattgctttttatgcatatataaattgttgtaagacaaatcccagtttgacaatttcatatccatacacacaaagcagttagtcttaggattgactgctttttaaaaagacaccatttaggtgtaatgatgtcttttgggtgttattttataggtcatatcaaggctcattcaatcgtggtaaattcgtggtaaaatgagttttttctatacttcaaaatacttgaaagtatagtgtttatgcggataatcgaaaattagatataaaatttgacataattagtttatagaatctatattaaaaattataattatgatgacattttttggaaggttatgcaaatgccaactaatagcaaaaagagtaattcattaagggcaagtggtgcttttaaggctccttcgattttattaaaaaagggggaagtagaccttacagataaatatgatgagcaagcggaataccttttgggattagtagatgagtgtagtcataattttatggaaaagtatgatattgatgagtatattattgattatgaagatggtatggatgaggaagtactaaagtgtttagcctacattaatatgaataacattgaggaggctaaaaaaatagcacaagaatcaatcaataatggtaatagagggaattatgagaatggagggaaagctttttttgattggatattgatgctttaataagtatatctaattacatctctacgtaaggatatccgaaaaaactgaatattgtttcgttaaagatttagaacgcattgttttcatagcacttgttgctacattaaaaggtaaaaaaatccttgttaaaggcaaccatgatgatgtgtctgattacagatataagcagcttttttatgatatatgcgattacagagagatacatgactcatacggtggtaagaattatgaccttgtgctgtgtcactatcctatattttcatggaaaggcatgaataaaggtacgatcctgttatacggtcacacccacaacagtgcagaggatgtatattttcaaaagtgtctgactggtatggaagcgaataattgcaggcatgtaggtgataagccaatacaggcatacaatgtaggctgcatgaagccgtggattgactatgagccaagaagtttgaaagaaattatcgacatggtttaagatatcaaataaataacataattgaggcacggagtattaattccgtgcctcaattgttttatccggattacctttctgttgtaaaataaagggcgttatttcagtgcagatataattttgaaatatggcttgaaaaggctgtaatatttcagaccatctgtttcaccgtagctctttgtgatggcagatcttatgccattgagattctttgttttattcttgtttttttcaagaaaatcaacaaaatttccgggatcattaatatcactgtgtgcgaaaattatacctgtaaaacgctctaccttctttttacgcgtgagcttttcaggcgtaaaagagtaggatttgtcttttatggttttataaattgtctgaccctgtttcataccataaacatgaaccagcgtctcatgaagcttgagcagattgtcttttcccatgcagtttaggaaagaatctacctcaaaatggtcgaagtcttcggatactgccgatacttcagaaatatctgatgtatcaatgctgtccattgaggccttagcctcagctgcttcgtttttatttgagctgttaccagaaccgttatgaggtgtctgttcgtcagtgaatggtaagtcatcattagtcataagcttatcacttgacggtaagtcatcgttagttgcaagctcatcacctaacggttcactgtctgtatagctgctatgattgccatcgataagttcattcagattgtaagactttgcggtgatagcatcggtatcagtatcggtattgatattgatattgacgttatcttccctggatggaatatctgctactacctgatacttgatgttttttcttcgctggacagcctgtttgcagaaatttacattgaatctgcgtacagcgaatcccttatctttccagaaccttacagcagggtcatagcctgtgtcattgctcattatgatgtactcatcagcacatgactcggctgatgcagcatcacatttgttttcactgaatgaaccagcgcatcccatcagatatcccatatatgatacgagctgaaaatcaagggcattcgtgccctcataggattcctcaaatcggatatttattttgttattttccataagtctgatgactgacatgtatgacatgtgaggggatttcttagtgtaaaaaacaataatttcgtcgtcctcatctgccatatcaaacagcatcagccagttgtcgttgacattttcgctgtctactaaaaagtgtctgataataatcaccattaatccggataaaggtattgtagcatgtgtaggagaaaatggcaaataatatagatttaagtaaatgttaacaatacaaagagtgcaacatatgatataattttaatatatcttgaaaatgaagggggaatagagttggcagatattgaaataaataaatcagatattgatgaagttaatgatgtgatacaagaaacagatgaagaagcatatgcgttggattctgaatttacagagaaaaaggaatataaaacagtacagaaatatgagcttgtgacgattctgtcgtatcttataggtgtcagaaatgagatacttgatcatatgtgcagtgatgagtatgtggagcttttaaacagcttaagagaaaataaaaatgcgaggatactcagatatctgtgtaaggcgcgtacaggtctgctgcgcaactataaaaaaacagacaatgaaataaaatataatctgggtaatataaacaggatggagtggtttgatgcagagaatataaataagcttgagagctgggaagtgcatattatattgtataattcatcggctgacaagtattgcgtacatattaacaagctgattaatgagcacgtggatgcatgtaaaaagcttttcccagactggataaaatgggagtatatcagggatttgtttgtcatagtggattatgaaaagccaaagaagctaaaggcagagtttactgtctataaagagcacagaaaagagtatccatatgggatgtatatccactggcgcccggatggcaggggaaatttgctcaattctgacggaaggattttaaagacaatatacagacagcatggtgattatttcaacgacggttcaaaatacagggatgcagtggaagatacaaaggaaaatatatatgagtttatccgtgaaagcatgcgtgttgtgatagttgtggattgtgaaaattctgatgtatacaagctgtatggagtattaaaaaacttaaattctgagcaaatgtccaaaatagaaaaaattatactctatgatgattatcatacatcctgtggatgggactggctggaaaaattcatacatatccctgtattccacgaggaggtggaacgtgtgacagaccgaaagtcgcttgttgatataaagatgactgcgggagtgtgtgaggcgtattataaggacaacatagactcgtttattttgtgctcaagtgattcggattactggggacttatttcatcggtaaaggatgctcatttcctcgtgatgtacgaatatagcaagtgcggacagtcgatcaaggatgcacttacaaaacgatgtatatttcattgttcaatagacgatttctatacaggaaatgcaagtgatttaaagaaaaaagtcatgataagtgaattgaaaaatctgacaaatgatattgtcggaaaaaatggctgggagatgacaagacagatatacgagaggactaaaattacatcgacagagcgagaaatgaaggatttttacaataaatatgttaagtcattgcggttaaaaattaatgaggacggagtattcgagattgtggtcaatgaatattgattatcgtaaaactgttttatgtaattattgtcggtcacacatgtattgtgtgaaggttaagccttattttagcggaaagagtgggaaagtatgatgaaaccgatgcttgaaatctgctgtggcagcttttcggatgtgaaaacagcatatgaaaatggtgcagacagggttgaactgaacagtgccctatatatgggagggctgacacctacactcgccaatttagcaaaggagaactgcaatataccggtagtggcaatggttcggccgaggggtggcggattttgctattcggatgaagaatacgacactatgcttatggatgcaaaaattcttttagagcatggagcagatggtattgcgtttggatttctgacagaggaaaaaatgcttgacaaaaagcgcacgaaggaaatgatagagctcattcatgagtatggcagggaagctgtgtttcaccgcgcctttgactgcatagataatcaggacagtgcagcggagaagcttattaggcttggcgcagatcgtatcctcacaagcggtggagcagtaaatgtatgggatggcagaaaacagcttaagcatcttcaaaatcaatatggaaaagatattacgattctggctggaagcggcgtgaatgataccaatgtgagagcatttatcgaatacacgggaattacgcaggtgcacagctcgtgtggctcatggaagtgtgatgtgacagcagcgggtaatgcagtagatttttcgtatgatgaagcgatgaaaaactgctatcagtgtgcggatgcaggtaaggttaggaagcttgcggaagaggtaagtggagaggacagcagtatgctcggtacagaaggaacagccgactatctggtcgatgccgtaaagagaagatttggacttgaataatacatatacaattaaataacggattgtgttataatatgtctgtcggcggattcgtcggcagactttttttaaggagagtaaaatgagagtattaacagatttagagccaaagaacgttttttcgtttttcgaggatatatgcagtattcctcatccatcatacaaggaagaaaaaatcagtaattatctggtggagtttgcaaaggcaagaggccttgagcattaccaggatgagcttcacaatgtgataatcataaaggaagcatcagaaggatatgaggatgtggagccaatcatactgcaggggcacatggatatggtttgcgagaaggcacctgactgtgataagaatatggacgaggaaggccttgaccttttgatagatggtgattttatctcggcaaagggcactacactcggtggagatgacggtatcgcggtggcatatgcgcttgctattttggacgatgacagcctgtcacatccacgccttgagtttgtatgcactgtatgcgaggaggtcggcatggagggtgctacaggcatcgatgtgtctatgcttaagggaaagaagcttcttaatatggacagcgaggaggagggcgtgatgctcgcaagctgcgccggtggatgcagagccgatgtgaagctgcctgtagagagagagactgtgagcggaacaaagctcactgtgagcttatcaggtctcaccggcggacactcaggctcagagattgataagggaaggggcaatgccaatactcttatgtccagactgcttcgcgacgcatcggcacctgtagctatagcttctatagatggcggcagaaaggataatgccattccaagagagtgtactgcacagattattgtagcacctgatgaggctgcggcagtgaaggcttcgatagaacaggcagcagctgagattgcggaggagtttaaggcatctgatcctgaccttaagcttgctgtgtcagaggagactgactgtagtgagtcagctataagtgcaaaggacagcgcaagggttatcgcacttatcgaggcactgccaaacggcatcatcagaatgagccgggaaatcgataagcttgttgagacctcgcttaatctgggagttttaaaatcagacgatgctgctgtcactttaagatacgcagtaagaagctctgtcggtgtggctaaaaaaagccttaagaaccagcttgtctgcatagcaggcgcttttgcggcagaggttacatttgagggcgattatcctgcatgggagtacaagaaggattcaaagctccgcgaggatatggtacggatttttgaggagatgtatggcaaaaagcctacagttgaggctattcatgccggtgtcgagtgcggacttttaagcggcaagattgaaggactcgactgcatatcaatgggaccggacatgtatgatatccatacgactgaggagaggctttccatatcctctgcaaagaggtcatatgagtatatactcagagtgattgcgtgcaaataaatagttattcaaggcttttgataaaggaaagaggtgtcatatgatacctctttttaaatgccctgtgaaaatagctcagattgtgaaatccgacagacagtgagacatctaaaattgaggtgttgccgcgctcgaactgttccacggatttttcaagacgcacattgttgatatactgcacgcaggtcatgttcatgtgttttttgaagaaacgcatgaagtggtattcactgaaatagcaaagcccggcaagctctgaaacctggatgctttcggcataatgcacttcgatgtaatcgagcacatttttgagcttatcggaggatgtgttgacaccgaaatcagcatttttttcactgtattgcagcaatagaaatattgcctgaagcagaaatgcctttagagccagctcatagccgaattcctgaccggagtatagatttgttatgcgcatgaagcatttgcaaagggatgaatatgccggatgcttcggtgcaatcaggtaaggcatggcaaactcatggttgattagcggagtcagatatcttgaagagcatatatcggtattgtttccacctaaaaaattgatatggaatacatacgtttccgagtaaaattcgtcgcagtcccttattgaaatggaatgcagcagcagtggcgggataaagatgatatcgccttcctttgcttcatattcgagcaaatcaatctgataggtgcatgagccctttgtgatcagtgtgagctctgcctcatcgtgccagtgtgtagtgatgacagggtaatctgctgcaagtcttgttatatatttctgaactgggaaaaatacttctccgtgctttgtgttttctttctgcccgagggcaggcggattattgtttttcatattgttgtttctccatagcttttaaaactataccctttaaaattataagagcagtattgtgttataaaatgaaaaaatattgcaagaatttatactaaacaccttctataatagcagtataatacatcaaggcgaagtgctcaagatgtaaatgagagcaaaatttatgattagataagaggtacacattatggagagaaaatggtggcatgacaaggtggcatatcagatttatccaaagagctttctggatacaaacggtgacggaataggagatttaagaggtatcatttcaaagctggattatttaaaatcgcttggaattgacatcatatggctgtctccgatatataaatcgccatttgtggatcagggctatgacatatctgattactatgcgatagctgaagagttcggtactatggaggagtttgatgagctccttgccgaggcaaagaagcgtgatatgcacatcatcatggatctggtaataaatcactgctcggataagcacgaatggtttcaaaaggcacttaaggatccggatggagagtatgctgattacttttatttcagaaaaggtaaaaacggcaatccgccgagcaattaccgctcttattttggcggaagctgctgggagaaggtgccgggcacggacaagtattatctgcacatgtttgcgaaggagcagccggatttaaactgggagaatgaaaagctaagacaaaagctttatgagatgattaactggtggctggataagggcttgtcaggatttagaatagatgcgataatcaatataaagaaaaatctcgatttccctgattttgagccggatgcagaggatggactggctgcctgctacaagatggttgaaagtgcagaaggtgtcggagagctcttagaggaattaaagaacaatacatttaagaagtatgatgcatttacggttggcgaggtattcaatatgaagcctgaggagctgccggagtttatcggtgagaatgggcatttttcaacaatatttgatttttgtgcacagtgcttaagtgatggagagcatggatggtatgatgcaccgaaaatagattttgacaaatggagaaaggccattcttggttcacagcttgagacagaaaagtacggctttaaggccaatatcatagaaaatcatgatgagccgagaggtgcctcaagatttttaccaaagcatgctcaaaatcctgccggaataaagatgttaggaactgtcagcgtactgcttcgaggcattccgtttatataccagggacaggaaatcggtatgcaaaatgcaaaatggaacagtatagatgagtatgacgatatcagcacaaaggatcagtacaaggcagcacttgcagcaggcttatcaaaggagcaggcacttgcagcctgtggaaggatgagcagggataatgcaaggacacctatgcagtggagtgatgaggcaaatgccggttttaccacagcaaagccatggcttaaggtcaatgaaaactataaggctatcaatgttgcggcgcaggaaaaggatccttcatctgttttgaactattacagaaggcttgtggcactcagaaagtcagatgaatttaaggagctgttcacctacggcagatgtgttccggcatatgaggatacagatggcatcatggcttattacagagaggatgaaaataagcgcgtgctggttgtggcaaattttggcagtaaagaggcacaaatcaggctggatggcagtgtgaaaaaggtgcttttgtccaacacaaatgatgctgaaaagagcactgtttcagtgggagcatccgagcttaagcttgaaagctgtgaggttttggtggtgcttgtaaaatagcataatttgatacagcattaaagaaaccaggctgaatttttacaaaaagaggcagctaaaagagataacaaaaagagataatgaagagacaaggagggcataatgagcaaaaacaataacgaaaaatggtggaaaaaggcggtagtttaccagatttatccaaagagctttcaggattctaacggagacggctttggtgatttacagggtatcatcaaaagacttgattatcttgagacacttggaatcaatgcaatatggctttcgccggtattcaaatcaccgcaggcggacaacggttatgacatttcggattacagggatattgatccgacgtttggcagtctcgatgatatggaggagctcataaacgaggcaaagaagcacaatataagaattatgatggatcttgtcttaaatcattcttcaaacgagcacaggtggttcaaggaggctaaaaagagcaaggacaatccataccatgactactatatttggagagacggagatgaaggcgtgccgccaagtgatatgaaggcttgtttcggtggaagcgcatgggaatatgtgccggaaatcggacagtattatttccatcagtttttaccggagcagccggatttaaactgggagaatccaaaggtcagaagagcaatctacgatatgattctctggtggatggacaagggagtcggcggcttcagacttgatgtaatcgaccagatagcaaaagagccggacaagagaatcaccataaacggaccaaggcttcaggaatattttaaggaactgagcagggagaccttccagaagcgcgacctgattaccgtaggtgaggcatggggcgcagacacagagcgcgcaaagctttacagcaatccggatggcagcgagttttctatggtgttccagtttgagcacatagggcttgaccagaaggagggcggcgagaaatgggaccttgcaccgcttccgtttaaaaagctcaaaaagataatggctcactggcagaatgagctctacaactgtggctggaacagtctgttctgggacaatcatgacctgccgcgtatcgtgtcaagatggggcaatgacagggagtacagagtggaatctgcaaagatgcttgctatattgctgcacggcatgcagggtacaccatacatctatcagggcgaggagctgggcatgacaaatgtacagtatgatatcgaggattataaggactgtgaaatcataaacatgtaccatgagcgccttgaaaaaggatactcaaaggatgaaatcatgaagtccatttacgcaaagggccgtgacaatgcaaggacacctatgcagtgggatgactcggcaaatgccggcttcaccacaggaacaccttggataaaagtaaatgacaattacgacaaaataaatgccaaatcacaggtggatgaccctgattcaatctttagctgctacaagaagcttgttcagctgagaaaggattatccggtatttgttgatggtaaattcacacttttacttgaggatgatgagaatatttttgcatacagcagaaagaatgaagaaaaaaccatgattgttgtgtgcaatttctttgacaaggagataccaatgtcgcttgcaaaggagtgtgagggcatggaggtgctgatttcaaattataaggatacctctgatatgtcagtgctcagaccttatgaggccaggatgtatatacgatagataaaattgataccgcttgtttttataaaggtgttttataaaagcaggcggtattattgtattttttaaagataatgtatataataagttaccataaaagttcaagcgaggatgaaaggaacaaattccatgtacgatataataataataggcagtggtccggcaggactgtctgcagcaatatatgcaaagagagccaatctgaatgtggcagtagcagaaaaagaatacgaggggacaggccagatagctgagagcggaaatgtgaacaactatctggggcttcccaacataaacggatacgacctgggagagaaattcagggagcatgcagtgtcccttgatgtagaatttatcgaaaaagaagcagtgcagatagaagcagtgcaaaatggtgagaaagaagaatcagtgatatacagagtgaaattcgatgatgacacgatagcagaggcaagagcgctcatctataccgcaggagcatatccgagaaaggcaggagtgccgggagaggatgagtataccggtaagggagtatcttactgcgcaatctgtgacggagcattctataaagggaagacagccgcagtgctgggcggcggagataccgctttggatgatgcattatatctgtccgatatatgtgagaaggtctatctggttcacagaagagacagcttccgcggtgcgcagagcacagttgagctcttaaagcagaaagaaaatgtagagcttgtcctaaacgaagcagtgacagaaatatatggagaaaaaaagccaacaggcataaagcttaaaagtggcaggactctggctgtagacggagtattcgtggcatatggctcagtaccgcagtcagagcttataaagaatctggtgcagctcgatgagagaggatatgtagtggcaggtgaggacggcatcacatatgctgcaacaaaaaatggtgaccatgatagaagcgttcagccgggactgtatgtggcgggagatgtccgtaccaagacactgcgccaggtggtaaccgcagtatctgacggagcaaatgccgcaacgacagccgcagagtatttaagggacatcaatggctataaacaaaatatataaccacgcacaaataatttgtataactgatagcattgactttcaacacacacgtttgtataataatctcatcaattcctagtaacacaatagactatgtaagaattaacgagaagaagaaaacaatgagatttaatacaagcttacttcatgccggcgtgacaaaagagacaaatggctctacactgccaccggtatatcagacaagcgccttcgagcaggagagcgcggcagatctggaaaaaatatttgaaaacaaagctccgggctactgttacacaagagttgccaatcctacgattacagcttttgagaacagaataacaaagctcgagggaggaatagcatcggtggcatgcgcatcaggcatggcggcactgatgaataccttcttaaatatactaagcagtggagatgagctcatctcaagcgccagcctctacggtggcacaatagatttgttccatgatcttgaggccttcggcatcacaaccagatatgtcgagaacaacaactggcagcagatagaggacagcatcaatgagcataccagactgatttttgcagagactatcggtaatccctgtctggacgtcacagatattgagaagcttgcagagatagcacacgcacatgatataccgcttgtagttgacaataccacatcgacagcttacctgatacaggttttaaagcatggagctgatatcgtggtcaattcatcttccaaatatatcaatggaagcagcaatgcaatcagtggtattctgacagactcaggtaagttcaaatgggacaagaacagatatccggggtttgcagattatgtgaagtatggacctgtggcatttgtcgcaaagctgagaaacagtcttttcagaaatatgggtgcctgtttagctccggtgaatgcatacttaaatattataggacttgagacactcggtcttagaatggaaagagaatgctctaatgcactcgagcttgcgtcgtggatagaaaacaattatcctgacataaaggttaattatccggggctttgtagcagcaaatggcatgaaatagcaaaaaaacagctcacaaacggctatggagcaatccttacaatcagggttggcagcaaggaaaaggcatttaaatttatagacagcctgacgattccatacacactcagcaatatcggagatacaaagacactggtcattcatccgggctccacaatcagtcttcacagcacagataagcagaaggaggatgcaggagtatttgaggatcttataagagtcagcgtgggtatcgaggatatagatgacctcaaggaggattttgcacaggcttttgcaaatatagctgattaagccatcacaataaggtatcaatgtgtatgcaaatgagagcgtgcatatgcatttacatataaaacaaaacattaacatatttacacagtaaggagattaaaaatggcggagaaagttgattacgcggccctaaaaaagggcggtttcatgagacagaagcaaaagggctgtttctcgcttagaattgcggttgtaggaggaaatcttacagcagaaaatatcaaaacagtagcagaggttgctgagaaatacggacacggatatgttcatatgacatcgcgtcagggtattgagattccttttatcaaggttgaggatatcaatgtggtaaaagaggaactggcaaagggcggtgtaggaacaggtgtctgcggaccgagagtacgtactgtcacagcgtgtcagggctcagaaatctgtcctagcggatgtatcgatacatacactctggctaaggaacttgatgaaagatacttcggaagagagcttcctcacaagttcaagtttggtgtcacaggctgtcagaacaactgcttaaaggccgaggaaaacgatgtcggaatcaagggcggcatgacagtagagtgcagccatgacgattgtatccagtgtggtgtatgtgtgaaggcatgccgcgagggtgcacttagcatggaggatggcaggattgtcatcgacagagacaaatgtaacaactgtgcgcgctgcgtaaagagctgtccgacagatgcatggaagggaactccgggatatatcgtatcgtttggaggacttttcggaaaccacatctataaaggagagcagctagtcccgattatccgcgacaaggaaactcttttcagagtgacagatgcagcaattagtttcttcgagaagcatgcaaacggtggtgagcgtttcagacttactcttcagagagtgggcgaggaagagttcaaaaaagagattcaggcagcatacgagggtaaataattcccatgtatagcaggaaatatccggcatgcataaacaacaacggttacggcaaaaatataataaatatgagtataggaagggagatgcaaaatggcagatatagcattcgacgatcaggtagatataactgacaaggtttgccctcttacatttgtaaaggcaaaggtagcaatagaggaattagatgacggtgaggtgcttgcaatccgtatgaatgatggagagccggtacagaatgttccaagaagcatgaaggaagagggacacaagatacttaagctcgaggacaatgaggatggaacatacactctttacgtcagaaaggttgaggactaatcatggcagcaagaatttcaaaggcggatttcgatgaaaaagtattaaaaagcaagcttccggtaattgttgatttttactcggattcatgtgtggcctgcaagaagctggcaccggttctcggagatatcgaggatgattatgaggataagcttcacgtatacaaggtcaacacaaactttgacggagagctcgctgatgagtatgaggtgactgcgaatccgacactgcttttcgtaaaagacgcagaggtcttagacagaaaggtcggcgtacaaaagcctgccgatttgaaggcatgggttgaagaattattatagtctttagattattatataaagcagtctgatacaggataataacacatacagataccacaatctgtgacacaggaggaaataaaatgactatcacagtagcaggagagaagaaagaatataaggatggacttacattaccggagcttatcgagcttgagaatgtagatatgcctgagtatgtaacagtttcaataaatgaggaatttgttgccacagaggataagccaaagacagtgcttaaggatggcgacaatgtagagttcctttacttcatgggaggtggatgctaatggcaatgactgatgagcagatcgagcgctattcacgccacattatccttaaagaggtgggcgttaaaggtcagaagaaattattaaaaggcaaggtgcttattatcggtgccggcggactcggagctccggcagccatgtatcttgcagcagcaggagttggcacaatcggtattgtggatgcggatgaggtagatttatccaacctgcagagacagattatccacggaacagccgatgtgggcaaagccaaggtaaagtcagcaaaagagacaatgaacgccatgaacccggacgttcaggtcaatacataccgtatgtttgtagatgcgtcaaacatcagagagcttatcagggattatgatttcatcatcgatggaactgacaatttcccggcaaagttcttaatcaacgatgcatgtgtgcttgagaaaaagccgttttcacatgcaggaatcatccgtttcaagggtcagctcatgacatatgtgccgggagagggaccttgctacagatgtgtattcaagaatccgccaccaaaggatgcagtgcctacatgtaagcaggcaggcgttatcggagctatgggcggagtaatcggttcgcttcaggctatggaggctatcaagtatttaatcggtgttggagagctgctgacaggatatctgcttacatatgatgcactcaccatggagttccacaagattaagcttccgaaggatacacacaactgtgcagtctgtggcgaccatccgactattctcgagccaatcgactacgagcaggaggtctgcgaggagacagcgggcagatttgatgcacctcgtacacaggaataaaaagacagtaaggaaaggaacgatatgcgtatcataagaatgaaatatccgtttctggatgaaatagcaaaatatgctaaagagcatctgccggaggaggcgtgtggtctgatagcaggcagtgaggacgaaaacggtcgtctcatcacaaaggtatattacctgacgaatacagaccatgccgaggaccatttcacaatggatccaaaggagcagctggcagccataaaggacatgagagcaaacggccttaagccgcttggcaactggcattcacatccgtctagcccttcaaggccatcggatgaggatataaagcttgcatacgatccaaatgcgagctacatgataatgtcgcttatggcagaaaatcctgtaatcaactcgtttcatatcgagggtggacaggtcacgaaagaggatttacgaatatattctgatgaatattacttctaaatcatatgttaatgttttgagtcgcagcgaaagctgcaaagaaaagtcagcttcatcgaagatggcttttcttttttagagaaagatgttattatagcatgtatatttaataaaacgaaagagcgttcgaaaatgaaattaaaaacgaaggaacttacaacatgtgcactttttgcggcacttatagcagttggagcatttatcaagattgatattccgcttcctatgtacaccatgcattttacattacagtggttctttgtgctgatggcgggatttctgctgggggcaaagctggcatcgcttagcgtgatagtatatttgtgcatcggactggtgggagtgcctgtatttgcggcaggcggtggtcctacatacattttaagaccgggctttgggttcctcttaggctttgtgcttgccgcatttttaatcggagctatcacagaaaagcttaaaaagaccaatgcgtttacactcattcttccggcaacggtcggactggtggcatattatacagttggagcaatatacttttactgcatgaagaatttctatgcggcaacacctgtcagctggggcatagtaatagtagattactgtctgataactgttgcaccggactttatattatgcgtatcggcagcagtgttttctgccaagcttcgtcctgtttttgaaggaatgctcaatggatacagtgtgaagcataaggcaaaaaataaagcataaagcgtataataaagtataaaataaggcatgaaatatatatgaaataaagtatggatatggtattacagggagataaaaatggcgtattttccgatgtttgtggatatgacggaaagagagtgtctgatcgtcggcggtggaaatgtggcataccgcaaggtgattgtaatgctggattttggcgcgaaggtcacggttgtggcagagaatatatgtgatgagctgagaaagcttacaattgatgatatagcaagcgaggataaaacgggctcatatacggcaaatatagaaaacaataagacggattcggatgcagcagatagaattacgttcatagaaagaaggtttgaacgaaaagactgtgatggcatggaaatggttatcgctgccactgatgataatgctttaaatcatgagattgcagagtattgcaaagctaaggacatcatggtaaatgcggtcgatcaaaaggctgattgcagctttatttttccgtcatacataaaggaaaagaatcttgttgcggcattttcgagcggaggaaacagccctgtgctgactcagtatctgaaaggcaaagagcaggagattcttactccgtttcttggtgagctgaacgaatacatgggacaaatccgcgaaaaagtaatagcgcaatatgacactcaagccgggagaaagcgtgtatttaaagaaatattgtgtgcagctattgataatggaaggattccggaaatatagtttaaagtatggtattacagattttaagttgttgttcatttataaattataaatggaaaatggcatgatccgtaggagagtaaaatgaggtatttaataggaacgagaggatcaaagcttgctcttgttcagactgattacgtgatagataagttaaaaagagcatatccggatgatgattttaaggctgttatcataaagacaacaggcgatttagagcagaaaaaggcactcgataagattggctcaaagggtatcttcgtaaacgagatagaggacgagcttttatcgggaaagattcatatggcagtccattccatgaaggatatgcctgatgaaccggcagcagggcttacatttgcaaaggcatggaagcgtgaagatccaagggatgttttggtgctaaaaaatgctgcttcactggatgagcttcctcatggtgccgtgataggaaccggaagcaagcgcagaaagtatcagcttttaaagctgcgtcctgaccttaaggtggttggcatacgcggaaatatcgatacaaggcttcgtaagctatatgatggtgaaattatatatgaagaggttgccgataatactgtaaataacagtgagatagctaacgaaaaacagaataagtataacgaatacaggctggatggaatcgtacttgcagcggcgggaataaagcgtatcggaagagattctgagatcacacagtacttttcggaggatgatatgattccggctccggcacagggcacactggcgattgagctacgtgctgacaatgctaagctgatggcaaagcttgatgctttgtcagatgagaaaaccaatctgtgcgcaggcattgagagagaatttttaaagcaaatcggtggaaactgtcatctgcctgtggctgcatactgtgatattgtaagtgaaaaagaccgcggtaatgacagcaacaaaaataacaggctaaagcttcttgcgatgtttggctcggaggatggaaaacagcttgcaaggacagagcagatatgggatattacatcagacagaaacaatattgtggagcgtgcggtgcacgatattcggtataaattggaaagtaattaggaaaatcatgagagaaaacacaggaaaagtagtattagttggagcaggaccgggagatacgggcctgctcactttaaaaggagaaaaatatataaaacaggcggattgtctggtgtatgacaggctgtcatcaccagagtttctttcaatggcaaaggcaggctgtgagcttatttatgtgggcaaggaaaatcacaaccatgtcatgaagcaggatgccataaacgagcttttatacgagaaatcaaaatatcatgagcttgtagtccgtttaaagggcggagatccgtatgtctttggaagaggcggagaggaagctctctacctggtagatagaaatgtggaggtagaagtggtaccgggtgtcagttcatcggttgcagcgcttgcggctgcagggatacctatcacacacagaggcatagcaaaaggctttcaggtcatcactgcgcacagcagaaaggatgaggaggcagatatagactattcccttcttacagatgagacaatcacctgcgtatttttgatgggacttgcgcatgtaaaaagcattgcagcagggcttatgaaagcaggacgaagagaggatactccggcagcagtgatatcgaacggcacacttgccgcgcagcgcaaatgtataggaacgcttgcggatatcggagaaaagattgaggaagcaaagctgacatcaccggctataatcgttgtgggagatgtggtttcactgaatgacaggcttgatttctttgaaaaaagaccgctgtttggaagaaaaatcacagtaccgtatatcaaaacaaacgaattgatagcaaaattacagcagcttggagcagatgtcacaccggttaagacaggcataataaacccgataataattcctgaatttgccgataaggtaagatcagctgactggatagtttttacaagcaaaaatggtgtaagatcatttttctataatctggagctggcaggtgcagacatcaggcttatagcaaatgcaaggtttgcagtagtgggaaaagctacagaaaaagagcttgcaaagcatcacataaatgcagatattattccggcagaacagaccggaaaagaacttgcaggagaattgagttcatatatgggcgataatgatgaaatcaaagtctgcattttctcggcaaaggaggcttcacctgaccttgaggcagggcttaaagaaatatgtcaattagaaaaaattgatgcatatgtaaatgagcaggcatatgagagtattcctgaaagcattggaaacatggtaagtgaagctgtttttacaagcgcatcaaatgtggaaagattttttcatatgctgccggagaatgcatacgtggaaacagcatactcaataggtgaaaaaacaacagcagcattagagcagcacgatgtcagagagatagtacaagctgatgatagcagttatgaagcgctggtagataaaatatcttataaagatgcttttaaagattaagaatttatggtgacaaaagttatataaagttatataataaatgcaaagttatataaggttatataaacttatatacgaaacaaaaagttatataaagttatataaggggaaaacaaaatgcaaaatccatttacattatcattcgggaaaaaaccactgcaatatatatcaagaatctcacagaccaatcagatagtagagacatttaggtcagaaaatcctgtaaaccagctttttatgataaccggggtaaggggatcgggcaaaacggttatgatgaccaatatagtatcagagataaagaaggatgaggaatggctgacagttgagcttaaccctacgagagatatgcttcagagccttgcagctaagatttacagtatgcctcagatgaataaaatatttgtcaatgcaaaactggatttttcagcgtttggactgggcgtttccatagaaaatgcagcaccggttacggatatagaaaatgtgctggaattgatgcttgaaaatataaagaaacataataagcggttactcatttcagttgatgaggttacgaactgtgaatttgtaaaagtatttgtcagttcatttcagatatttctgagacaggattatcctatttttctgcttatgacggggctgtttgaaaatatatatgatctgcagaatgacaaggcacttacatttttgtacagagcgcctaagataatgcttgagccacttagctttacagcagtcaggaaacactatatggatatttttgaactggatcaaagcgaggcagacaaaatggcagctcttacaaagggatatccttttgcatttcaggtattgggatatctttactgggaaaacagggatgatcacacgatagaagatattttaccggaatatgatcagtgccttgatgagtatgtgtacagtaaaatctggtcggagctgtcagagcttgataaaaaaatattgttggaaatatcagtaagtggtgaagaaaaggtaaaagaaatcagagaaaaactggatatgaattcaggattattctcggtatatagagaccggctcaaaagaaagggggttatagatacctctgagtacggtaaaattactctcacacttccacgatttgaagaatttgtcaaaacgcgccaaatgtaatatactatatccaactgaaacattaacataataaaggagaagcacaatgaaagaatacagtataggtacaaagtgtgtacaggcaggctatgcagccggaaacggagagccgagacagattccgattattcagtcaactacattcaaatatgacacaagcgaggacatgggaaagctttttgaccttgaggcagagggctatttctacagcagactgcagaatccgacctgtgacacggtagcaagaaaaatcgcagctatggagggtggcactgctgccatgctcacatcatcaggacaggcagccaatttctatgccatgttcaacatatgtgagtgcggagaccatatcgtggcatcatcatccatctatggaggcaccttcaacctcatcgcggtaactatggcaaagatgggtattacagctacattcgtatctcctgatgctacagaggaggagctgaatgcagcattcagaccgaacacaaagcttatgtttggtgagactattgccaatcctgcgcttacggtgcttgatatagagctttttgcaaaggtggcacacgagcacggagtaccgcttatagtggacaataccttcccgacacctgtaaactgcagaccaattgagtggggcgcagatattgtcacacactctaccacaaagtacatggacggacacggagccacactcggcggagcaatcgtagacagcggcaaattcgactggatggtacatgcagataaatatccgggactgtgcacacctgacgacagctatcatggcatcacatatgcagagaaattcggcaaggaaggtgcgtttatcaccaaatgtacagcacagcttatgcgcgattttggttctatgcagtcaccacagaatgcatttatgctgaatcttggccttgagtcacttcatgtgcgtatgccaaagcatgtggaaaatggacaggcagtggctgaatttttggaaaatcatccaaaggttgcctatgtaaactactcagggcttccttcaaacaaatactatgagagagcacagaagtatcttccaaacggaggctgcggagtcgtatcatttggcttaaagggcggcagagaggcagcgtctgcatttatgaaggcattaaggcttggtgcaatcgagacacatgtggcagatgcgagaacctgctgcttaaatccggcaacaagcacgcatcgtcagatgaatgatgagcagcttaaggaagcaggagtgccggcagagcttatcagaataagcttaggtcttgaggacaaggtggatttgattgcagatatctcaaacgcactcgacgctataaaataaaatatatattcataaaatacacaaaaagaacaaaattagtaaaaacaaaactttacgaaatgacttactaatgatatagtagtgataggtatgaaagagttttaataattattttatttttgtgggaattattatgagtaatagatttgatgatgaaaacaatatagagatggatataaagaccgcattcgcatcctggggaaagtatgtttttaagtgctttccgcaggaatgccgtttgaggtcttttttatcagaggattcattagatgactcagaagagaaaaatgtggatattataaacaatccgtttatagacagcatggttgacaggaacaatctgctgaaggctgttgaacagattgcagatggagaaaaatttgctactgtagtactgcatgccaaggaaggaacagatacctacaggatatcattcaagtcgatttgctttgatgatgatggcagaacagttgaggcaatagggcttgctgagcagcttgatgagcgtcttaacgagagtgagatggtgaatgctttaggaagcaacttcaacagtatctactatgtagatgtagacaacaataagatgtatccgtacaggatgaatccttctgtccgtgctatgtttggagaagtgcttgagtcaaaaccgggctatcaagagatgatggaacagtatgtaaatgctatcgtcttagaagaggataagcttcacatgcttttagagacatcaattaataatctgcgcaggcagtttttgataaaggatacctatcagcatgattaccgcatcgtgagggatggacaggtacagtattgcagagcaaagtttgtcaatgtgtctggcgtgggagagctgcacaagatgatagcgggcttttcggatataagcccggagaagcaaagagagcttgagcgtatagcgtatgtggatgcagtgaccggaggcaacaattacgagagctttaaaaagaagctgcgtgacagaaatgtatcaggatatctgatttccatggatattcactccttcaagatagtaaactccatctgtggtgtggcaaagggcgatgaggcgcttagatggatttctgaaaatatacgcggtgttgtaggatataatgacatatcaggtcatataaatgcagacagatttgttattttctttgcggatgacaagataaataaggttatcagaaagatagagaccatcaatttacagcttattaaggtttcagaatccttaaagattccaaagattcagccatactttggtgtgacaaaatgggagccgggcaaaaaggttgaggaagcatacggcgaggccaactttgccaagaatcggatcaaggagcggaaggacgtgctctatcagatatacagtcaggccgatacagaaaggattgtcgaagaaaagcagatggaggataacttctacagggatttaaatgacaatcattttgagatatggtatcagcccaagtatgctccaaagaccaacaagctggtcggtgcagagggacttgtcaggtggagaagagaaaataatgagattattccgccatccaaatttataccgctttttgaaagaaacggcatgattaaggcgcttgatgagtatgtattccgcgaggtgtgtacacatcagagaagatggcttgatgaagggaaaaaaatagttcctatctcaatcaacctgtccagagcgagcctgtactttgagtctgtggtcaaaagatatcatgatatagcaagaagaatcggcatatacacacatcttgtgcctatagagattacagagagtgcagctgtcgataatgatgaaatcaagattattgcggataaattccatggcaatggatttccacttttggtggatgattttggctcaggctattcatcacttgctaccctcaatatgaagtgctttgatacactcaaaatcgacaagagcctgattgactatataggagattcaaatggtgagaggctgcttgtgcacacgatagcactggccaaggagctgggaatctgcgtgaccgccgagggtgttgagagtcaggagcaggtagagtttttgaagaatatagactgcgacagtatacagggcttttattattcaaagccactgccgttagccgagtatgagatgcttttggattgataaatataaaaaatataagcagtataaaagagccggtcacgtgaccggctcttttgaggggagtataaataattaataagaggtataacattgaaaagatttctctcttcggaaacattataaaataacagtaattaaaaagcaatactttgacacacaaaataatataatcttaataaaacgggttaatttattaaagagttaaagtactaaagtgccagctataatgattttggtgatttatcgcagttcacatctcataataaaatgaatatcataatgtaaattcgtattttggcgtatggatgtatgaaatttaaaatagtttatgcggatgagctttataaggtgcaaaaagagatgaatgcactgcttatagatataagaacaagagaggaatacgacaggtcgcactggaaaggcgcactcagcatgcctatggatatcacggattcatatgagagtgaactcgatgtgtcacagagtgtgattttttactgcacgcatggtggaagcagcatgaagctggccagatatctgggaaatcgcggttttgatacagcgacagtcataggtggatacaatgctatgtgcggatatcaaaaaaagttgcagaaatatggctgaaactatttaaaaaaattgaaatttatgcaacaatattagataacaatgtaaagtacaattatagaaaggcagttacacaatatatgaatagatttgagcttgttgtgccatgtcattttggccttgaggcagtcgtaaagagggagatatatgatctgggatatgagataacacgtgtggaggacggcagggtatcgtttgagggcgatgctgaggctatatgcagagcgaatatattcttaagaggcgcagagagagtattacttcaggtaggacgctttaaggctgccacatttgatgagctttttgaaaatgtaaaggctctcccatgggaaaattatattcccaaggacggcagattctgggtgaaaaaggcttcttccataaagagtaagcttttttcaccatctgatatacagtctatcgtgaaaaaggctatggttgagagaatgaagaggtcttatcacattgactggttcccggaggatggagcacagtatccggtaagggtttttctgtacaaggatgaggtgatggtgacacttgatacatcgggggattcccttcacaagagaggataccgtctggcaacgagcaaggcgccgctgactgagacacttgcagcatcgctcatcatgcttacaccatggcatgcagacagaatacttgtggatccgttttgtggcagtggtacatttccgatagaggcagccatgatggcagcaaacatagcacccggtatgaacagggagtttacagctgagagctggaccaatatcataccaagaaagctgtggtatgaggctgtgcaggaggcagaggatatgatagataaggatgtgcaggtggacatccagggctatgacattgaccctgatgtggtggctgcagccagggaaaatgccaagagagccggagtggagcacatgattcatttccagcagagggctgtggctgacctgcatcacccgaagaagtacggatttattatctcaaatcctccatacggtgagcgactcgaggagaaatcagcgctcccggcactgtattcacagattggagaagcttataagaggcttgatgcatggtcgatgtatctgattacgagctatgaggatacagagcgctatatcggcagaaaagctgacaaaaacaggaaaatctacaatggtatgataaagacatatttttatcagtttatggggcctaagcctccgagaaggaaaaaggattagcagggtatatgaaatattcaaagagatatattgcatttacatttatcttggcacttatctttgtgtctaatttttacatatatgcaaaggacagctctacacttggcgcgttcagaggagcacagatagataatactatatggagtccgcttgtggctgctgatgtaaatggcaccaccatcaggcttagcatagaaaataaggagtatacgagcgaggatgagcatgtgtatatggatgagaacaggaatataatggttcccgtgtctatgcttcgcgatgcactaaacagcagtgcacatgtatacaataaaaatgagcttctggtggaaaagcacagtctgacagctgatttcaagctggcagatgacaatggctttgtacagtataaggggcagttttatgcaagcttagacaagttgtctaaacttttggatatgacctgcagctttgatacggcgacaaatacactcactatgacagacaaatccgagggtgtatcaacggtgccaacaaagtatgatctgagggaaagacagcgtgtgtcactaatcagggatcagggcagctatggcacctgttgggcttttgcggccacaagtgcactcgagtcagcccttatgccggaggagcaacttttgttttccgtggatcatatgagtatgagcaattccttcaacgtcaatcagtatgacggtggagagtataccatgggaatggcatatctggcagcatggcagggaccggtttatgacgcggatgatccttacggagatggagtgacacgcgatgatcttgctgcagtaaagcatgtgcagcagatgcttatcatagatggaaaggactatcagggcataaaggaggctgttttcaaatatggtggtgtgcagacatcgctttacagtacaatagcaagctcaaagacaaagacgccttattacaataagcagactaattcttactgttacatggggcaagataagccaaatcatgatgtggttataattggctgggatgacaattaccctaaggaaaacttcaatgtggatctggaaggagatggagcctttatatgccagaacagctggggcagcagttttggagacaatggggtgttctatgtgtcatactacgatacaaatgtgggcacgcacaatgttgtttatacagatatagagagtgctgacaattatgataatatataccagagtgacctgtgtggctgggtaggaaagatgggctacgacaaggaggatatgtacggagccaacatatttaccgcacagtcggctgaatcactaagggcttccggcttttatgctacagcagcggatacctcatacaagctgtatgtagttaagaattttgagaatgagtattcttttaaaaataagacgctggtggctgaggggtcactaaaaaatgcaggctattacactgttgattttgatgagcctgttgatttggagtccggtgagcgttatgccattgtactttatataaatacaccgggctcgactcatccgatggctatagagtacaactcgggagaagcatacatgtctacggtcaatctggatgatggcgagggctacatcagctatgatggtgtggcatatatcaatgtaaaggaaaaacaggattgtaacctctgtataaaggccttttctgataacagatgatatgtatagaaatattctaaagataataacagtatttttcgttatgcttgcacttatcgtgccggtcacgcttgaaaagcttccggctataaatgagaagtatgatatggcaaaagcactggaggataatgtgctgcaaaactatgtcaaggcttccacagatgcaaagcaggagaagaaccctgatgagatattgcaggagaaagccggctttgaggatgatttaaggatagagctgccggacgactcagaaggggagcgccaaagtatatcggtggaaaccgatgccctgacgcagacggtctatgtaaagcttaaggctgatgtggacaattactttacgaagtattccatgacaggcaggtcaaatcatatagactccatgcagtattaccgcaagggggcagagggtgtgatagctatcactacagacaagctctatcaggtgaagcagcgcatagagaatggatatctttatctgagctttgtcaatctgcatgatatatacgataaggtcatcataatagatgcaggtcacggcggtcgtatgaccggtgccgtgcgaaacggaatagaggaaaaaagcatcaatctggacatagtgctggcacttaaggaacagcttgacagctattcaggtgacaaaaggcttggaatattctacaccaggacaacagataccaatcctacactgcagcagagagcggcacttgccaataaggcggatgcggatttatttataagcgtgcattgcaactcatatgaaaagggcaatttcaccgcggtttcgggtacgcaggtgctctacagccagtcagataacagagagctcggaagtaaacaccttgcacagatttgcatggataacgtgacagctgtgacaggaaacagggcatttgggctgcttcctgcagatgacatatatataataagaacaagtgaggctccggttgcgcttgtggaggtgggcttcatgaccaacagacaggagcttgacaatctggccaatgcagactatcagaaacaggcagcgcagggtatatacaatgcaatcatgcaggcctttgatgagggctactagctgtatctggaaattgtccgaatagaaaaagaaggaaggaaatatattatgacaaaaatcatatttgcaacaggaaacaaggataagctcagagaaatcaaagagatactttcagactgtgacgtggatatacgttcaatgaaggaagcaggtatcaatgtggatatagtggaggatgggaagacctttgaagacaatgcgctgattaaggcacgcgcaattgcggcacacacagatgcaattgttctcgcagacgactcaggacttgagattgactatctgaataaggaaccgggagtatattcagcgcgctatatgggcgaggatacttcctatgatataaagaataataaccttatagaacgccttgacggtgtgccaaaggagaagcgtacagcccgctttgtgtgtgctatcgccgcagtgctgccggatggaaaggaacttgtgaccagacagactatggagggctacataggatgggagatagcgggagccaacggctttggttatgatcctatcttctatttagatgagtacggctgctcttctgcagagcttactccccagcagaagaatgccataagccatcgaggcaaggctcttcgcgccatgagagagatgcttgtgaaggttatctagagtataggcgttgaattgcaacgtatacggataaaatgcctgccgggaagctcttttaagctgtccggcagccactttaaaaaaaatataaaaaaaataaaaaaagttgttgacatattctgccctttgctatatactaattcttgcgtcacggaaagaacgcaaacaaatccttcggggtgtggctcagcttggctagagcgcctggtttgggaccaggaggtcgcaggttcgaatcctgtcaccccgactacatgcgggtgtagttcaatggtagaacaccagccttccaagctggatacgtgggttcgattcccatcacccgcttagatattgcagcattcgcagtatcccatatgtgtctgtagctcagttggatagagcaccggccttctaagccgggtgtcgggggttcgaatcccttcaggcacattttttatttcatatcaattccatttggaccatatgaagtaaatatggtgggtatagcgcagttggttagcgcgccagattgtggctctggaggcccagggttcgaatccctgtatccaccctttgcattagtgcaaatagtgtcgtgcgcattatatgcgtatccgtgcggcgcacgagtattactcaagggctatcgccaagcggtaaggcacaggattttgattcctgcattcgttggttcgaatccaactagccctgttacaatttgaatatatgggatattagctcaggtggtagagcacttgacttttaatcaagttgtccggggttcgaatccccgatgtctcattagcgtaaaagaagccgttccttgaacggtttttttgtatttagaagaatggaggtttcgaactccggacaacgtagttgaccgaagcgtagacagagaaaaatatgtgggtattatatgcatttggatccgcattttttgcgggtataacatcaatactggcaaagtgtggtatcaaaaaaactgattcaaacgtagcaactgcaatcaggacaattgtagttttgattttttcatggattatggtatttgtggttaaagcgcaggggcagattacagctgtgtcagcaaagacatggatatttctgatgctttcaggagtcgctaccggagcctcatggctctgttattttaaagcactccagcttggcgatgtaaacagagtggtgccgattgataaatcaagcacaatactgaccattatacttgcatttatcttttttaaagaggagataaacgtactcaggctggtatgtgtggtgcttatagcaattggaacgtatatgatgatcaccaaaaaggagatatcacaggaagagcagaataaggccaggggttcccatggatggctgttttatgcagtgctgtctgctgtttttgccagcttcacctcaatactgggaaaggtcggcatagagggaatcaattctaatctgggaactgcaataaggacgatagtggtgcttattatggcttggatagtggtatttgccacaggaaaacagcacaccataaagcatatagagaaaaaagagcttggctttatctgcctttcgggacttgcaacaggcggctcatggctttgctattacaaggcactgcaggacggacttgcgagtgtcgtagtgcctatagataagctgagcatagttgtgtcaattgtgttttcatatttcgtatttaaggaaaagctgacgattaaatcctttacaggactggtgctcatcatagcaggaacattgattatgctggtttaaatatataaaaacatcttgacgtttttctgtttttctattatcattgttaaccgaggaaatatttatagttgacaattataacggatgatatgtattataatgatacttattaaatgagagaagaaatacaggacacgaaggagattaaaatggatccaataacactggcacaggagataatagacggaagaagaatcacaagggatgatgacctatcatttttccttacatgtgatttagacgagctgtgtaagggcgcagatatgatcagggagaagtttatcggtgacaaggtagatttgtgctcgataataaacggaagaagcggaaaatgccctgaggactgcaaatactgtgcgcagtcagcacataatcatacaaattgtgaggtttatgattttttacctgaggaaaagatacttgaggcttgcaggatgaatgagagagagggtgtagaccgtttctcgatagttacagcgggaaaagcgctgacaggtgaggaatttgacaaggcaatacatgcatatgagactatgaaaagagagtgtaagattgatttatgtgcatcaatgggctttctttcagcagagcagcttcacagactgcacgaggcaggtgtcagcagctatcaccacaatatagagacctcaaagcgtaatttccccaatatatgcaccacacatacctatgatatgaagattgagacgcttaaaaaggtgaaggaagagggcatgtatgcgtgctcaggcggcatcatcggaatgggtgagacctgggaggacaggcttgatatggcagtaagccttgcagaggtaggagtggattccattccgcttaatgcgcttatgccgattgcaggcactccgcttgagggacttgagcatatcagtgagcctgatatactgcgtacagtgtcatttttcagatatataaatccaaaggctgacatacgtctcggagccggaagagcgctgcttacaaatgacggagagcttgcattcaagtcgggagcatcagccacaattacaggaaacatgcttacgacagtagcgtgtgccacaatcagaagtgacaaggaaatgcttgagggcatgggcaggaatgtgacacctgagtacatgaaataaaggtaattattcagaatataaaatatgtcaaagatgcgtaaaatagtattagttttgcgcatcttttttagtacaaatgacaggattggttgcggggtgaaaaatattattatataatgaaaaaaatgtaatttaagggatttatccggtatagcatggaacatgaataggagcgaattaatatatttcattgaaaaataagaggttacgggggaaatatgtacaacgataaaggtaatacaaaatatctgaagcttttaaaacaaaattattcatcaagtcaggatgtaatcagggagatagtcaatctttctgcgattataaacctgccaaagggcacggagtttttcctgagtgatatacatggcgagtatgaggcttttttacatatcatgaacaactgctcaggtgtgataaaggaaaaggtggatttgattttcaaggatacgatttctgattatgacagacaggagctttgcacgctcatatactatccaagagagaaaatggccctgcttgatgaacagggcaagatagacagtgactggtatgctatgacgttaaatcagcttatacttgtcgcaaagctgctctcatcaaagtacaccaggtcgaaggtcagaaaggctctgcctgaggaatatgcgtacattatcgatgagcttttgcatgcgcaggaggatgaggatgcaaaccaggtcagatatcacaagcagatattaaagactataattgatttggaggatgcggatgagtttataatcgctttgtctgcactgattaagaggcttgctgttgaccatctgcacattgtgggagatgtatttgacagaggaggaagcgcggataagattctcgatctgctttatgattatcactcgcttgatattgagtggggcaatcacgacattctctggatgggtgcggcatgtggaaatgatgcatgtatatgtaatgtcatccgcaacaatcttaaatacaacaatgtggaaattcttgagaatgcctacggaataagcttacgacagctaatgctgtttggcatgaaaacatatggtatagaggatggaattgaggctgcaagggcggccatcacagtaatgctttttaagcttgaggggcagcttatacttgcacatcccgagtatgagatgggaaacaggctgatgcttgacaggctggacgagctgcaggatgtaggagtggacagaaagcgctttccaaccgttgatgatgagagaccctacgcactaagtgacgaggagactgtcatcatgagaaagctgcacagacagtttgtgacaggacagcgcctgcacaagcatgtcagatttttgtatgataagggcggcatgtacaatgtatacaatggcaacctgctctatcatggctgtgttccggttgatagcaacggagcctttgataagctgtatattgatggtgaattttatcacggaagggcgttgcttgacaaatgtgatgagaaggcaagggctgcgtatgtggacaatccttataaggatgatgtggactttatgtggtttttgtggggaggagaaaaatcaccgctgtgcggcagaaggcttaagacctttgagatggaatatgttacagacaagagcatgtgggaagagccttctaacccatattacagcaggtattacgataagagcttctgctgtcagatactgcacgagttcgggctgtatgatgatgatgcgcatatcataaatggacatacaccggttcacgcaatagagggagagaaccctgtcagggccaatggcaagctgtttgtgatagatggaggcttctgccgtgcgatgaacaagaaaaccggtatcgccggctatacactgatttacaattcacatggtctaaggctcaaggcacacacgccttttacatcggtggaggatgccctgataaataatactgacatagagacatcatcagaggtcgaggaaaatgataagagacgtatgcttgtgaaggataccgatatagggaagaggcttattggagagattgatgatctgcacaagcttcttgagaactacaggaggctgtagggaacatattagactgtagggtacgtatggaacctgaccttgacaaataagttataaagagttataaaaagaatacaaagttataaagagttataaaaattattaaaagttataaagagttataaaacaggagcgcagagatgaaaaataatcccttttcattatcatttggcaaggaaccggtcagtttaattaaccgtaatgttcagtcttatgaaataattgatacatttgaggatgaaaaccctacttaccaggtttgtatgattacaggagtcagaggctcagggaaaactgtaatgctcacagaaatcaataaaacttttagggcagaggaagactggattgttatcgatctgagccctgaacgtgatttattacaatcatttgctgcaaatctgagcaattatccaagtttgtcagaggtttttcgtgaagctaaaataaatctgtcattcttagggctgggcgttgaaatagaaggtgtttctccgattaccgatttaaatgtggcagtgacgaggatgcttgaaaagattaaaaagaagcgtaagagagttcttgtaacaatagacgaggctgtatgtaatgatacaatgaaagagtttgtcagcctgtttcagatatatatgagacaggatcttccggtatttttgcttatgacaggtctttatgagaatatttatgagcttcagaatgaaaaaacgctcacatttttgtacagggcacctaaaattgagcttcgtccgttgaatataggcatgatagctgaaaaatacaagtctatttttgaattgacggatgaggaagctacagagatggctaaagagacgaggggatatccgtttgccttccaggtactggggtatctttgttttaagcataataccggatggcataatgtattacctgaattcagtcagtatctggaggaatatgtatatgaaaagatatggagtgagctgtcaaaaggtgataaggaattgttggttgctatggcaaaaaccaatgacaccaaagtggaagcaatacgaaagactataaaaaaggcatcaaacagtttcagtgtatacaggaacaggcttataaaaaaaggcttgattatttcaccggagtatggacatttggagtttacactcccaaggttcaaagaatttgtgttgtgtagataattattgcactgtcgggatataaccggcagtgttttttttgtgtaaatgattcaatttaaatctatgtaaaaaattacataaaaagtaataaatcacaaaaatgcgtatacaaaactacaaaatgtaaaaccatttacattgctgtgtgcattggttatagtatgtgtgtaaataagaaacgcaaataaatctggccggatatattgcaataaatagaatgagaaaaggagatactatcatgaaaaagtataacgtatgtattgtaggtggaggaagcacatatacacttggatttttaaaatcatttgcacgtatgcaggaggagtttccattaaataagctcgtattatttgatattgacggcgagagacaaaagccaatcggacagtatggagacatcatgtttgcagagagatatcctgagcttgatttttcttacacaacagatccaaaggaagcttaccaggatatggatttcatctttatgcagatgcgtgccggtggacttcatatgcgtcagaaggatgagcatattccactcagctttggcaaggtaggacaggagacatgtggagcaggcggaatggcatacggacttcgttcatgtgtagacatgattgaggctgttcaccagattcgtgagtactcacctgaggcatggatacttaactactctaacccggctgcaatcgttgcagaggcactcagaagagagttccctgatgataagagaatcctcaatatctgtgaccagcctgagaatgtagttcgttcgacaagtcgtctgttaggctgcgactggggcgatcttgatcctgtatacttcggcttgaaccattatggatggtttacacatatgtatgaccgcaagacaggagaggatttacttccaaagattcgtcagattgtaaaggaaaaaggcttccttccacaggatgcagagcagcgtgatcagtcatggcttgatacatatggctttgtacagacaatgatggaggatttcccggattaccttcctaatacatatgacggatattacctgtaccctgagtacaagacaagccatttaaaccctgaatatacacgtgcggatgaggtaattgcaggccgtgagagtcgtgtatttaaagaggctgctgaggtaattaaagcaggaaagctcggagacaaattccatgctatctcagatgcccacgcagagatgatgattaaggttgcagaggctattgcattcaatacattaggacgtttcatccttatcgttgaaaataatggtgctattgcaaacatgcaggatgatgcaatggttgaggtagtttgtgagcttggtatcaacggaccacgtcctatgagcgttggaaatatcccacagttctaccttggacttcttgtacagcaggtttcatgcgagaagcttctcgtagacgcatattatgagcattcttatcagaaagcgcttgaggcatttacacttaaccgtcttatcaatgacgctaaggtggcaagaaagattcttgatgctcttattgaggcaaacaaaggaatgtggcctgaattaaaataatgtattgcgtgaaaaactttaggatagggatgggtaaaatatatgaaaagtaaaataatgaagttcttctccgatttaggaagaagccttatgatgccggtcgctgcacttgcagcgtgtggtatcatactgggaatcacatctgcactgcttaaaacgcaggtgcaggatgccgtaccatttttgaccgcatcggtaccgctttttatcataacaacacttaataaggtatcgggcattgtatttacccttttgccggttctgtttgctatttctatagcatttggtctggctaaagaggataagggagttgcagcatttgccggttttatcggatattacacatttctggttgccagcagctgtatgatatcaacaggaataatggatttcagtgccatgaaaatatcaaatattcttggcgtggataccgttgatatgggagctcttgccggaataatggctggtcttgtgacagcaaagctgcataacaagtatcacaaggtacagtttccagcagcaatagcattttatggaggcaagcgatttgttgcccttgttgttcttgtgtcaatgacagtaataggacttgtgatgcctcttatctgggctccgatttctgttggaattgacggacttggaagaattatccgttcatcaggtgcgtttggagtatttatttttggaacactggagagattgctgattcctacaggtcttcatcatgtgcttaactcattgttcagaaccacggcaatcggtggtacataccatggagtagagggctgtctgaatattttcttacagtttttggatcaggcacctctttctgatatgaagccatatacacagtttttgggacagggaaagatgccttatatgctgtttggtcttccagcagcagcacttgctatttaccgtacaacacctcaggataagaaggcaaaggtaaaggcactcatgattgccggcgtggcagcatgttttgtttcaggtattacagagccacttgagttctcatttatgtttatagcaccggcattatttgttttccatgctatcatgggtggtatttcattcatgctcatgtcattgcttggagtaattgttggtaacacgggtggtggatttatcgacttcctgctatggggagtattccagccgggctcacactggtactgggtaatagttgtcggaataccatatgcatttatttactattttgtattcaaatggtatctgtcaagaaagaagattgtagtcagcgtatcagatgatgatgattctgatgcaaagtcagatgaaaagacaaatgaaggcaagaagtcaggctctaataagacagcattgcaggttattgcaggacttggcggaatggcgaatatcgtagttgtaaacaactgtatttcaagactgcgtgttgatgtaaaggatatgtcgcttattaatgaggaaacacttaagaaaacaggctcactcggtattgtaaagacaagtgatacacacattcaggtggtttacggaccaaaggttgagaaaatagctgatgctgtgcgcgcggcactaaatgataaggactgcgcagctgaggtggaaaaggtacaggatgagaagccgaagagtacggttattatttcaagccctatgacaggcttagccgagaatctgtcaaaagcacctgatgaggcatttgcaaataagctgatgggtgatggtgcggttgtcacaccaaaagacggaacggttgttgcccctgatgacggaacggtattattcgtattcgataaaaagcatgcgataggctttgcaaccgattcaggcgtcagtatgataattcacgtaggtattgacactgtcaagcttgatggaaagggctttgatgtaaaggtggaaacaggagcacatgtaaataagggtgatgtgcttatgcagcttgatctggattttctcagggaaaatgcaccatctatagcatctcctgttatttgtacagagctcaaggaaaatcagagcatcagacttataaacgaaggcgaaatcaaggcaggtgaaccgctgtttgctatcgatacatactaaaaattaaaagcagatataacattaaaagctaaatgaaaagagcaggaaaattgcaaatgattttcctgctctttattaaaaaaagcttatttttgggttaaaatatattcgataataatctggacaaatacaaatgctgtcattttagtgcgcagatgcgtgttttcggatggaagctccggcgcagtgatgcagatgtcagatgctgccagaagcgaagaatcaatatcgacgcttgaaatccatatgattttcacattctttgtatggcagcgctttgcgataggctcatatatttccttttctccataatttgtaaataaaatcaaggttgcattttcggggaaagagactgatattgctaaaagaaagtcaatccagtcaatatatatgcatggaatatctatcgcattgaacatggagtacaaatatctagcgggcagagaggaaagaccgcgaccatatatataaagggagtcgctttgagttacctccttgcatatggtttcaagctgcgctgaatcaagtccgtcaataaaatccttaagtatggaggtatgatgctgcataacgctccaggtggaaaatccggttgattctcttgaggcctttctcagggagtattttagttcgttgaagccattgaatccgattttctggcagaatctgactattgtagcatttgagataaataaatccttacatatgtcatttaaggacatgtatggaaggctcttttcatgggctataaaatactcaagtatgagcagctcgttttccgagaagtctgtggtatcaatctgatgcagaaggttcattgctgttatctcctttcctttgcaggttgaaatactccatgaatgagcttattacaaagaaggagccaagacgtgaggtgaaatcggcgccttcatattcacggggctttgaaaaaaaccttagattataatcagatacttcagccaggtcattattttctatggatgagattgagattacaatcatgccatgcagtcgggcttccttagccagatttaaggtgggctcaaagcgtcctgaattgcttataaaaacaaaaacatttcccttatccacggtctgtataaagtggtgtgcggccttggcagcagtggttttgtatattttctggcagcctgataaaaaaagcatgctttccagatagctgactgcaatgtctgtaagtccggcaggactgtgcaggtagataggacggttttctgaaaaaagccttgcaatctgaaacatgtcatctgaattgagcaggctcacagtgctgtccattgagtctttgatagtattcttgattatatcaagtgatttatcagagcctttgatcttgttattgtcctcattatcagagcttttaaggaaatatttaaactccgaaaagccactgaagccaagcttcctgcagaagcgaagtatcgttgaggtggaatagttaagctcattggcaaactgctggatgctgatagatgaaatgttatctgaatgatcatgtacatattgcagtatatcaagctccttggttgaaagggactgcaaaggaatgttgaggtttagcttcaaaataagcaccctcccttcttggaattacacattttatttatagactatgataacatccgaagtagcaaatgtaaaataaaagtgaatgtatgagattaaaatagaagattgaaatagaatatttacagtggtaaaatctacacatgaaatgaaaaggagcagcatatgccatacaactatgaaaaagtaaatcaaaagcttctggttccacagattgaggatcagcttgtaatgtatatacagcatgagaatattggaattggcgcaaagcttcccggtgagtacaagctggctgagatattcggagtgggcaggagtacgataagggaggctgtaaaaagtctggttacgaaagggatgcttgaggtgaagagaggctccggcacatttgtgaagtccacggagatagtggttgatgatccgcttggcttagcacagtttgaggacaagtatcgtctggcgatggagctttttgaggtgaggatgctgcttgagcctgatgtagctgcagtggcatgccagaaggcaacagaagaggacaaaaagcgtataaagagtctgtgtgatgaagtggagcagctgtatctgtcggggcagaaccatataaaaaaggatatggagtttcatgagacgatagccagatgcagtggaaatagagttgttgaggtactgattccgattattctaacagctattacgacgtttgcaaatctgacacacagaaagctgatcaacgagacaattgatacacacagggcaataaccgatgctattttaagtggagacaccatgggtgcaaagtgtgccatgataatgcatctcacatacaacagacagactattatagacatgtcagagcaaaataaaaattgtcagacaagttagcttaaacttaccacgagaattaaataaaatacactaaaaaccagtcatgttaaacagacatgactggttttttttgttacttttgtggaaaaaacttgtagatttgaaacaacttgatatgaagtatttaagattatatactttagatagatacaaaagacgtctgatgtatgtagggaacaacgtataacaatttaatgttatggaggaagaaaaaatgagtgaagcagcgacattagatccaacccgattggtgatagccgcgataatcggattagctctgttattagttttaattatcaaattcaaggttcatgcaatgatttccatattgcttggagcgataacaatcggtgttgtggcaggtatgcctcttaccgagattgtaacagcggtaaatgatggtatcagtaatactttaaagggcatagcactgcttgtaggactgggctccatgtttggagcaatactggaagcgtccggcggagcacagacacttgccgttacaatggtgaaaaagtttggcgatgaaaaagccgcatgggcacttggagtaaccggtttaattatagcaatgccggtattctttgacgcaggacttattatcctgataccacttgcattctcgcttgcaaagagaacaaagcgttccacactgttctatgcgatacctcttttagcaggacttgcagtcggacatgcatttataccgcctacaccgggtcctgtacttgtggcaacaatgctcaatgtagatttaggatgggtaatacttgtcggtatagcgtgtggaacagttgcaatgattattgcaggacctgtatggggttcgatttgtggaaaaaaatacatggttccggttccggagcatgtagcaagtcaggaggacatagatgaatctaagcttcctaagttcagcacaatcgtacttatcatagcaattccgcttgtgcttatcattttcaagtcactcgcaggtgttatccctgcaatggcaccggtagcaccagtatttacattccttggcgagccgtttgtggcactgcttattgcaacaatcgtggcaatgcttgtgcttggaaagagacatggctacagcatggaggagcttgaaaaaatcatgacaaagtctcttgagccgacaggacttatcttacttgtaacagcctgtggtggagtgctcagatatgtattgcagtactcaggactcggagatttgattggaaatgcagttgcatctgctaatttaccaatagtgcttgtagcctttattgtagctgcgctcgtacgaatctgtgttggttcagcaacagttgcaatgaccatggcagcaggaatcatagctgcaatgcctggaatatcagagctgccaccgctatatctggcatgtgttgtcgcagcagtagcaggaggctcaacagtatgttcacatttcaacgattcaggcttctggcttgttagatcactcgttggtgtggatgagaaaacaaatctgaagacatggacaatcatggagacactggttggcttcagcggatttgtagtagcgtttattatttcattattcgtatagaagaaaggacacagatatgcttagaagtgaagaagtaagaaaacttgcacctgagatggacccactcagaatgggtatgggatggaaggtcagtgacttgtctaagccacagataatgattgaaagcacatatggagacagccatccgggctcagctcacctgaacaaatttgtagaggaggctgtaaaggccgtggatgaaaacggcggaaaagcagccagatattatgcaacagatatgtgtgacggaatcgcacagggacatgacggaatcaactattcactggcacaccgtgatgctatcaccaaccttgttgaggcacaggccaatgcaacagtatttgacggtggagtgtttatcgcaagctgtgacaaggcaatgcctgccatgctcatgagtataggaagattaaaggatatgagtgcgattatggtgacaggcggagtcatggaagcacatgagttgccaaagaaatatatcgtagatgatcctgcctgcaagattaatgagcttctgacactcgagcagattggtaaatttgatgcatgggagaaaaccggtgtcatccctaacgagcagttggattattacaagcacaatgcatgcccaagctgtggagcctgctcattcatgggaacagcatctacaatgcagattatggcagaggcacttggacttatgcttccgggtacagcactcatgccatccacagcacctgagcttaaggaggcttcatacaatgcagggaagcagcttatggagctcatagcaaagggcatcacagcaaaggatattgttacaaaggaaagctttgagaatgcaatcatggttcatgcggctatctcaggttctacaaatgcaactatgcatttacctgcaattgcacatgagtttggcatccggatagatgcggatacatttgacagactgcacagaggtgcacattatctgctaaacatccgtccttcgggagactggccggcacagtacttctactatgctggaggcgtgcctagagtgatggaggagataaagagcatgctccaccttgatgtgatgacagtcacaggaaagactctcggcgagaacttagaggagcttaagaagaacggcttctacgagcactgtgacgagatactccgtgagaagtcaaagatttttggaagagcaattgacagagaggatatcatccattcctttgacaatgccaagggaacagacggaagtattgcaattcttaaaggaaatctggcacctgagggctgtgtaataaagcatacagcatgtcctaaggagatgtttaaggcagtgcttaacgctaagccgtatgactgcgaggaggcatgtatcagtgccgtattaaatggggaggtaaagccgggagatgccgtatttatcagatacgagggaccaagaggcagcggaatgcctgagatgttctacacaggcgaggcaatctgcgcagatccaaagcttgcttcaagcgtggcactcatcaccgacggaagattctccggtgcatcaagaggtccggttatcggacacgtatcacctgaggcagcggcaggcggaccaatcgcatttgtcgaagagggagatttgatcgagcttgatgttgaaaacagaaaaatcgcaattgtaggaataaagggcgagagaaagactccaaaggagattgatgctgttttagcagacagaaaggcgcactggaagggctttaagagcaaataccagcatggacttttaaagctctatgcgcagcatgcagtaagctctatgaagggtgcttacatggattaatacctgttgattttatgatatttggatacagaaaggaattattatgaatacaattattgagaaattaaaagaaatgcttgttgtacctgtagtggtacttgacgatgtaaaagatgcagaaaagcttgcagatgctcttgtaggtggaggacttccttgtgctgaggtaaccttcagaaccgctgcggcagaggaatcaatccgcattatgacagagaaatatcctgatatgcttgtaggtgctggaacagttcttacaaccgagcaggtggataaagcagttgcagcaggcgcgaagtttatagtaagccccggctttgatgcagaaattgttgattactgtctggataaaaatatcccgattttacctggtgtaatctcaccttcagaggcagcacaggctgtcaagagaggtcttagtgtggttaaattcttccctgctgagcagtatggcggagtgactacaatcaaggctcttgcagcaccatatactatgcttaagttcatgcctacaggtggtgtgagtgtgaagaacttaaaggattacttaagctgtgacaagattatctgctgtggcggaagctggatggtaaagggcgatatgataaagtccggagagtttgacaagataaagcagatgacaaaggaagccgtagagcttgcacacagtatcagaaagtaaaggagagtataaaaccatgaaccttaatttaaagccaaagagtgaatgtaaatatgatgcagtttcattaggagaggtaatgcttcgtctggatccgggcgagggaagaatcagaacagcaagatccttcagagcatgggaaggcggcggagagtacaatgtagtccgcggtttaagaaagtgctttaagatgaacacaggtgtcatcacagcgtttgctgacaacgaggtaggaaagctcatggaggatttcatctgtcagggaggtgtggacacatccctcatcaagtggatgaagacagacggaatcggacgtgtatgcagaaacggtctcaactttacagagagaggcttcggtatccgtggtgcagtcggatgctctgacagagcaaatactgctatttcaaaggcaacacctgaggattttgatttcgattacatctttggtgagcttggagtcagatggcttcatacaggcggtatctatgcagcaatctctgagcagacctgtgagacagtgcttgcagcaataaagacagcaaagaaatacggaacaattgtatcctacgacttaaactaccgtccttcaatgtggagtgcaatcggtggacaggcaaaggcgcaggaggtaaacaaagaaatcgctaaatatgttgacgtaatgatcggaaacgaagaggatttcacagcatgccttggttttgagattgaaggaaacgatgcaaacctcaaggaattaaatcttgacggatataagaagatgattaatgaggcagcaaaggcttatcctaactttaaggcagtagcaacaacactgcgtacagtaaagacagccacagtcaatgactggagcgcaatctgctgggcagatggagaggtctacaaggcaaaggattacaacggacttgagattatggacagagtcggcggtggagattccttcgcatcaggcctcatctatggactgatgacaacagaggatgccgagactgcagtaaactatggtgcagctcatggtgcacttgccatgacaacaccgggtgacacaactatggtaagcgtcaacgaggttgaggctatcatgggtggcgcaggcgccagagttcagagataggatatcgtaaaaagtgaggaggcagagtatggaacagagatttataacaatgggcgaaataatgcttagactgactccgcccaactatgagaaaatcagaatgacacattcatttgaggcaagctacggcggagcggaggccaatatagcacttgcgcttgcaaacctcggcatcgactctaccttctttacggtagtaccggataacagcatcggaaagagcgcaatcagaatgctgcgctcaaacgatgtgcattgtgcaccgattattctgtcgacaccggatgagactccgacacacagactcggaagctactatttggaggcaggctttggaatcagaccaagcaaggtaatctatgacagaaagcacagtgcgataacagagtatgatttttccaaggttgacttgaagaaattgttgacaggatttacctggttgcatctaagcggaatcacaccggcgcttgcaccaaactgcaggcagcttattatggacaccttaaaggtggcaaaggcgcttggcattacggtcagcttcgatggaaacttccgcagtacattatggtcatgggaagaggcaagagacttctgcacacagtgtctgccatacattgatgtgttaatcggaatcgagccttatcatttgtataaagatccatccaatcattcattgggtgatgtgaaggatgggataccgcttcatctgagctacgaacaggaagacgagattttttcaaattttgcaattcaatatcctaatataaaatacatggctcgtcatgttcgttatgctcacagcggaagcgaaaacagtctcaaagcgtacctttggtacaatggaaggacttatgagagcaaaatgtttacattcacaatccttgacagggttggtggtggagatgcttttgcatcaggactcatctacgctatgatgaataattatgaaccaatggatatagtgaattttgcagtggcaagcagtgcaatcaagcacacaataagaggcgatgcaaatatcactgatgatgtcgaatcgataaagaatctcatgaatatgaattatgacatcaaaagataaataaactaaaatatgattaaagagtaatccgtcatgccggggaatgcgcatggcggatttttcgtatgtaattgcttgtgtctgatacattttagatacaagtagctgttaatatataaatagccatgcataatacaggctgaatatataatccttaggattgacagcaaaagaagaatatgcaaagatttataaaggaaaatagttacggataataaagttttagaaggaaaatgatgatagaaatattaatagttgaagacgaaaaaccgatatcagacctcatcagattaaatctcatgaaagcaggctatagctgcacctgtgcctttgatggtatggaggcagcagacattctggaggagagaaattttgacctgataatacttgatgtaatgctgccgaagttaaacggctttgagcttatggaatacataaagccgcttggcatacctgtgatatttctcacagcaaaagccactttagatgacaggctaagaggtctcacgtccggtgccgaggactatatggtaaagccttttgagattgttgagcttttagcccgggtaaatatagtgctaagacgttataataagatggagcagcagctcacctttaaggatatagctatcgatacgaaaaaccagaatgtatcaaaggcaggaaagcatatagagcttacaccaaaggaatttgagctgcttgagcttttgatgcgcaataaaaatatcacacttttcagagaaaaaatatatgaagaaatatggggaagtgagtactctgtcgagtcgaggactctcgatcttcacatacagagactgcgcaaaaagcttgatataggagacagccttaaaaccgtatttaaggcaggatacaggctggaagaatagaaaactaaagaccattaaatatgggtaagcgtaatatacaaaaagagggataaatgaaattcaggtacaaggtattgttcacaaacttaatactgctttcacttggactggggctggtgggatacctcatgatacacaagaattttgagctggcgaagcagacacagcttaaaaatgctattgtgcagaataatctggtacagtcctctgtggagtatgagcttttgcagcttttaaattcagtttccgataattctgaaacttcgaacaataatacagataacaataatgcagaaaagagcagcatttccgcatcatcaatagtcgcgcaacttccgcagatcggaagccgtgtaagcagcagtgtgcgctcaagggattcatttttctacatatattttgatggtgaaaaagtatatacagatgacaaaagtgatgcaaggataagtgatacactttttaaaaatctcacaacaggaaacaaaaactatgtgataaaagaagaatcccaaaagcactatatctatgttacatcgcagagtgtgataaatgaaaaaaatctctggatagtaagtaaatgcgatgcatcagaggcgtatacactgcttgatgagcagataaactatttcaggctgataataatagtcatattgattgcagagtcggcagcaatgtattttatcagcaggtacatgacaaagccgctcgagaagcttaaccatgtcagcgaggaaatagcgcagggggattatgccacaagggtaaacgtaaaaagtcatgatgagatagggcttcttgcgcagaaatttaatatcatggcgcaggcagtatcggatcatgtagacgagcttaacgatatggtgcacaggcgtgagcagtttgtagcggattttacacacgagataaaaacccctatgacgtcgatcattggatatgcagacacgatgcgttcactggagcttccgagagaggagcagatgatggcgcttggatatatcttttcggagggaaaacgtctggagagcatgtcgcagaagctttttgagctgatatatctgcgccggcatgatattgaaaaagcgcgggttcatatggcagatctttgtgcagaggtggtaaaggttgttgagcctgcatacgaaaacaggcatcttactatagaaacagagatagaggatactgtgctgaccgtgaatagagagcttttggttacagcacttgtcaatctgatggataatgcaaggaaagcgtcagaagaaggtcagcaggttgaggttacaggaaaatttgtggacaatatggcttgtaatatacctaaagataaaacggatataggcgaagccgaatcagcagatgacaggaaatgcacgagggcatatgaaatatgcataatcgatcacggaatcggaatgactaaggaacaggcagaaagaatttgtgatgagttttatatggcagacaaatccagagccagaaaagagggcggtgccggaatcggaatgtcgcttgtggcaatcattttagagcaccataatgcagtactttcagtggaaagtgaacccggatgcggaacaacgatgaggattttgcttccgtggtaatctgaacgcagtatagatataaaaaatggtaaattcgtaagatttaaaggaagatatgaaaaaagacagcttcaaattaataataatgtctgttgcagtaatctgtatagtaatagcaggcatcatggtgcctggcatagtgcttgaggcaaaccagaaaagtgaacatgatcatgtggcgaaggttcctaaaagctatctgccttcaggctctgtaatggcaaaggaagcatctgccaatctgaaattgtcggagaagctctcgctcatagatgggcagtgggacagcacgacagatgatgctgcctcttatgagatggatgagcaggattatcaggcagttgccacatgcagaaaaagcatagaaaagctttatgacgaaaagctctatcctgtaaatctttcacctgactactctaactggtatacgtgggaggcagcagcgaaaaaggcatcggataatacttttaacacatatacggcatattactggataatcaggtttgagaagtatgatggtacacaaaatcatacaatctggatgcttgaggatgggacaatcattatggcaaaagcacatatgaaggatattagtgatatgagtgaatataaagaggttttgcaggcagatgatgaatcacaggcagaaaatgatttgtctgcttacaaaggatattttgactacagcgggatagatttttcaaagcttaacctgatatccgagacaacagcagtggagcaaaaaaataatgaaagctatgaggtgctgcagtttttacaggaaaatgaatatgtatatgcgattcatgagaagtgatatagacccggtttgcataagtatgtgcagaccgggtttttataataaaaaatgcaatgtatgatacaaaaagtttacaactgacatatatactcattataacaacagggaacacaaaaaaggagaaccacatatggataaaaggggtaacatatcttcacgaaatatgagattatttgcagcaattatgacactcatcgaggcacttgtcctcatatcactcgcaggctgtgcagataaaaaggtagattatggcactgatacagaaaaactgacaaaaagtgctgtatgcaatgtaaaggattttagtacagatgagacctacagcgatgagttttccgtgcagacagaaattggaaatgtaaatatagatataagtgcaaaagtggaactgcctgattgtaagacaatgtcagtagttgaagtggaaaagataccttattctgcaaagctcaaggaaaaggtattgaaggcatactttggagagtcacagatttattactatgataaggaacattggacaaaaacacagcttcaaaatcttattgattccataaattcctcaacaacaccaactgatacatctggcacaggaaacagagctgagtttttgaaggaatatacgcattatctggaaaatgccggggatgaatggactatagctacagagtatgattcatgtgatgagtttgtagggaaaaaaggaaacacctggtataacgtgaattttgttgcagatggtgatgaaaataaatggctgtcgggaattggcgcaggtccgattgaaggatataccaaaaagacaggaagtaatgaatacgagtggagcaatatatttaacgatggatatgtgcagcaatactttggaccggattcactcatggaatatgatacggtaaatgatatcacggattcacaggatacatcgggagaggaaatcgcgcaggaggaaaatgaatcgggtatcacaatagaagaagcggggaatatgatagacagttttttgaaagagacaggtttttcatccatcccgcagactgagagctcgcagctgaaatggagtggatataacgaaagagccgatcatgtgtatcaggaagatgatatacatgagtgtgtaagtggttatagattttactacaatatcggagttggcaaaatattatttgatgatgctttaaatccgatggattacagcggatacaatatgaaatatggtgatagtatagaggatacttttgataatgaattctacaatttttatattgataaatatggtataggtactttctttatagactgcccggtaagtatagtaagaaaacaggaaaatgtagaaatgcttcctttggaaaatatatttgatattgcccgggatgaacttaaaaacaatgctgatgaatatgtactggatacaaatgtaaaatattatactctaaaacttgcatacataagggtaaacaaccggactgatatgcaaaaatacagttatattccggcatggagtctggaattgctgcagaaagacactacaaatgcatgccctgtatttatcaacgcgattgacggaagtgtgatacatccggacgatctgagttaagatacagaatgtttacatcggaccgtactttcacaggaataattatgttgtagaaaaaatgtgacatatcagggaggattggcatatgagaaaacatacaagaatatttgcagcaattatgacactcatcgaggcacttgtcctcacatcattcacaggctgtgccggcaaaaaagtagattatgggaatgagagcgaaagtaaagagacaaaaaatatgtctgccttagctgatataaaggcagactccggctggaatgaaaactttacaatacagaccggtaatggcgagaaaacagtatatgtaaatgcaaatattgtagttccggactttgataacatgtcggttgttgaggtggaaaatgtaaagatagatgctgattacaaaaagcgttttctggatttatattttggtgggaacgagtactattatcacgatccggatcattatactgttgacgaactgaatgaggtcatagaggactggcagaaaacacaggatgaaactcacagtgagtggttggaacagcggctggctgaatatagggataagcttgaaacggcaaagactacttataccgtggcaaaggatctcgaaaactgtgaagtatttgcaggctacaagggtgatgtgttctgtgaggtggattttgaggctcacaaggtacatgcttacgccttgcatcagtctgggacagattacggtccaccatctttaaggaatgaggactatgataccataacgcagacttttcaggatgatgatctaaaggataaggcagacgagacctcaaatgagggcagtaaatctgccgcatcagccaaaaaagaagccggggatttccttagtaaattgggaatgcaggatctggtggaacgaggtgaatgtgagtgcagttggatagggtttaataacagcgaagagggaaatgactatcagacagcagtgtggggatatatttattcatacgcgaccggcatagacggaatcacatttaaggatggatttgatatggatacctatttgtcggggtatgaagcaattgatagtgatatagatgatgttacactgcctgacagtacacttcttacagtcactgatgatggaataattgatgtgcagatggaatatccggtaaatgtaacacagatctataaggatgtggagcttatttctctgaaaaatatagagcagatcatcaaggcggagattacggaaaatcctgataaatatgatattgcatcgtcattcaataagctacagcttagttatcttaagataagaagtgacagtgagcagggaaaatacagctatgttccggcgtgggcactgtcacgtctggtagactactccaatgagcaaaatgctatctttgtaaacgctatagatggcacgatcataaatttggaaaattcactgtaaaggagaggctatgaagaggaaaaacgttattatatcggcgttggttcttgcaatagcattaaccggctgttcaggaaaaaaagtagattataatatggaaactgaaaatataaacacaaaagcaggaagtgatataagtgcatttgacgacagtacgaaatggaatgacagcttttctgttgagatatcggataaaagtgtggatgtggatatttcagcagacattaccctgccggactgcaaaagcatgtcggttgttgaggtgaagaatataaaggtgggtgccgatttcaaaaagagtgtgatagaggcttattttggcgatagtaccgtatattatcacgacatacctcattatacgaaagaagagatatatcacagcatggaggttgtaaaaaatgagattgccgggtatcagcaggaaattgatgcgggacttatcacagaagagggcgtcagcagggtgatgaaaagtgaaaatgatctgctggaacagtatgaaaaggcagaaccgtctgcactggatacgcgtgaaaaagctacagattatacggattgtaatgagtatctaggatatattggtaatgttttctgtgagattagatttggaattgctgaggacggctctcttgaatatatttcagcacagcctcttaaggcaggaagtgaggggacattatacgatgatagcgagtatggctattacggaccaccatcctttgcagaggagaaaggtgtagagggatttaacggaggctctacaggtggagatactacatcttcatatgataatgagtgtgcattatcaaaagacgaagctataaaaaaggcagaagaatttcaaaataaattaggcatggcttcacaggtatatataggaacatcagactacgagtggagcgcaggagtgatagaggatggtgatgatactgtaaaaactgatgataaagagagcgtcataaaggatacagcctggggatatatcatagattatggcgagggtgtggatggcatagcgttttgcaagtcactcgatttcacccggaatatggatatatgggagacactcgataactatgatgattttatgccatatggcagcagttcctttattgtgacggatcagggagtgacggaatttactgtttcttacccggttgatattgtaaatgagtcaaaaaacgtagaactcttgtcaatggacactattaaagagatcatcaaggatgacatgacaaaaaactcagatcagtatgattttacacaaaatcacacttacaacaatctaaagctcggatatatccgtttgaaggatgcatctgacaaggataaatgtacttatgttccggcatggtgtctgtcaaaacaggataagggctacgacagatatccggtgtatgtgaatgcgatagacggcacgatcataaggagtgatgatctaatataagatactgttattggctgcaataaagtttatacatggagttacatttttagataatagatcaggttcatatttatttggaaaagatgtggaaaatatatgattaataaaaagaaaaaatatatagggcgtttgacacttgccactgcaattacctctattttattttcaggatgtggggcggcacaaaaggagcttgcacagacgcacagagcttcctacgagaaaatatcataccagacagttacggtacagagcggttcactcacaccgcagactaccatcagtctgagcgcgcagggctataccaggttttcctatggtgcgacaaacacggagcttacgctcgaaaaggtaaatgtggcagtgggtgatcatgtgaaaaagggtgatatactggtggcttttaaatccggggagatacagaaaaagattgaggactacagcgggcagattagtcagaataagcttttagcagagcactacagggctattatgaaaatcgatgatactcaggattattcaagcgatattgcccagcttgataaggacacagaggttgcgcagctttatcttgatgagacagaggaaaaactgtcgagatatcagatcacggcatccgaggatggcacgatcacagcaatggacaattcgcttttggcgggagtttttgaaccgggcagcaatcttataacagaaatcagcggaaacggcaattacgaggctgacagaccggaaggttatgactttaatgtaggtgatgtatacacggcaacagcatctgatatagagtttgaacttaaggtaaaagaggtggacgataaaaaggttgtttttgaaccggtatcggacatgtcggcagtatcggatgcacagattttttcaatggaagtgacgcgccctgctatagaaaatgctgtgtatgtgcaaaaggacgcagtacatgagaaggatggcaggtattttgtatacacactggatgagaatggatacagacaggcggtatggataagtgtcgcagatcaggtgggagactaccggatcatcacagaaggacttaaaagcggggatgaggtggttttgcagtgaagaacagaaaccttttatcaataaaaaaactggcagtactggggatatgtgtatcgtttgtggcaggcggctgtggaaaaatgacagaaagtagcataccaaagcttgaagaacctgtagcgttaaatgaagcctatagacctgtggaatacggtacgatcggctcccagcaggtgctgatggctaccgcagttcctagggattactgcaattactacagtgccaatgtaaatatttcacagatatatgtggagccgggagatacagtaaatgtaggggatgtgcttgcagtctgtgatgtggatgaggcaaaaaaacagttgcagcaatgtaaggatgcgctggcgcatgagaatgagacatatgagatatccgctcagatctcggatacgcagatcaaattatgggagagtcaggctgcggatacggacgaactttcaacagaacagattgagaaaaaagagagcacagaagatgattacaatacgcagattgccacagaacaggaaaatcagcggtacgataagcagcttctcgaataccgagtgcaaaagatcaatgagcagatggctttatatcagcagattgttgatgatggaaagcttaaggcagcccacagcggtcttgtcacttacactaagaagctgacagatggaaggtctgctgcggcatacgagaatatagtcattgtctcagatacggatgaccttgtgctggatataaagggcacagccataaatgagtacaaatacagcgattatgacaagaaatatgtgatagtcgatggcgaaaaatatgatgtcactgagtctcaatatacatcagaggttttggtactttcaaagataaacaaccgatatccggatgtgtgcgtggaaagcagggaaaagccgtttcttacggcaggacagatgtatccggtatattttgaaaagacaaaagcaaatcaggcacttgtcgtgggaaaagattccatctataaggatggcgataccagatatgtctatgtgaaaaatgatgagggcggccgcgagaaacgcatcataacaacaggtgagtctgatgaaaactatacacaggtcacagagggcttaaaagagggggagctggtctactataattctacagatcaggttccgacaaagtatagcaaatatacggtaacaaggtctgactttgatatagcaaactacggtgtgcgctacagcagatctgacgcagggacgataaccgaaacctgtgattatgaagggcagatcgtatcggtcaatgtgaagcaggacgatacggtagaaaaggggatgctgctttacgtggtggataccggagagggcaaagctgccataacagaggcgaaaaatgcgatcgactcggagaatgaatcctatgcgcagaagattgctgattacgataaacagataaaagatttatctgaaggtggtagtagcgcagaagaaaataaccggcaggatgaaaagccggatacagcatatgatgagcagcagttgaaactgaatttacaattattgaatctgcagaaaaaacttgcctgtgcagaccacacctatcagctttcccggctacagtcagcatatgacagcataagcgcaggaaatgacggcaaaggaaatatttcagtatatgccaaaaatgacggaaaagtttcaaaggtgagtgtcaaggcaggagataatgtggagaaaggctcagatatcctgcagataaccggaaattccacggacgtactgttggttcaggtaaaggatagcaatagctataaagtatataaggacaatatagcagatgtgggagagcgcgtatcacttgagctggacggtacaacgatctacggaagctgtatcggttttgccggttacggcagggaagctcaaaagggatatataaatcaggatgataaaggtgtgcatattaccggaaacacagattcgggatatggaaatgcagcattttatataaaacttgacaatggaataccggatgatctgaccagggcatctgctgtaaagttttcttatgtttcttttaaaaaggtggtagtggtgccgacttcgatcatacacaagcaggtcaatcctatggacaaagatgatatatcatactatgtgtggaaaattgatggggacagcgtggtaaagcagccggtaatattgggcgattatacatcaggcagcaatacacttgtgctttacggtattgatgagggcgatgaaatatgtttggcttcgtaattaataaattaaaaaacagaaaatggttaaatctgtgtctgcttatgggagtggctttgtttatagcactttttgtgtgccaccctatgtttgaaaagggtgcgggaaatcagatactcgacagactttttacggatcatgccacacagcagaatgagtttccagcacggatgagccgcgagggaacatatgcggtggcagattatcctgattcgcagtcagtgcttgataagctgtcaggatacgaaaagaagtggactgaatatgtggatataaacaaggtttcctcacagcagcttatcacactctcaggaggacgcgcagatacagagtttggaggacctaacaattattttacaataggatatctgccgggactttcggagtacgcggatgttgtaaaatctcagactgacacagccacattcgaatgcagtataagcgaaaagacaatggatcactacggacttgtagcaggtgaaaaaatctatttacatgtacctgacggcagtggtaaaaaggaaattccgttcgttatatcacagatctgccgtgaaaaagatataaacgatccatattgggccaagacgctttcggatatgggcgatgtgatatttgtttcgcaggatgtttttgacgaaatgatgcagtattacagcgaggacaatatcagctacagtgattttctcatgctggattacaggcagatcaacacggaaaatgcctcactttatgacggttatatggagcagtttaaggatgctgacaagctctacaatgacaacatccgtgatacgctggagcgcttttttacacagcagaagacgataaagctgatgctttgggcgttggagctgccgtgtcttgtgcttttgattttatttataagaatgatatctgcacagatactttcgctcgaggaaaatgacatacttgttttaagaagccgcggtgcgacaaaattacaggtatttattttgtacctgcagcagtcgggaataatagcgtttgcgggctgtgtactcggaatagtgctcggatatataatgtgccgggctgccgcatctacagacggatttttaagatttacggcaaaggatataggcacttacagatttgtatggcagatgcttgtctatgcggtggcagcggcagttatcatggtgctgtttatcacagttccggtgtggaaaaaatcaaaggatgccatatcagagcgcagcagcaggaaacgaatatcaaagaaaaagcctctttgggagaaatgctttatagacattatacttttggctctgtcagcatatctgctttacaattacaacaagcagaagagtacgcttgcgatatctgttcttgagaacaggagcatagatcctgtcatgatactggacaattcgctttttatatttgcagcggcacttttgtgcgtaagacttaccggacttattattctgcttgtggacaggctctttaaaaagcgtttttctccggcaatgtatgcatcatttttacagctgaaacgaaccagatacaatcagggatttctggcagtatttcttatcatgacagtggctggcggtatttttgacgcgaatatggcgcgcaccatgaacagcaatatggaaaaacggatcgtctacaatgtgggttgtgatgcgatatacaacgaagatttcagactcaggatacagaagaataaagatggctctgtaagctggatgtatgacgagcctgatttcggtaaatacgagtcgctcaaaaatgagggcatctgtgacggtgtcacgcgtgtgcttgaggacgagcgggtagatatttccgcaggcagtggttcggtttcggatgcatatcttatggcgataaacacaaaagaattcggtgagactgcgaaattgcagagtgaccaaaatgatgatattaatgacgcgcactggttcaattacctgaatgagctggcaaaagagccggacggagtcatcatttcctcaaatctggcaaaagctctgggacttaaagttggtgacagcttaaattactcaaggtatgtaccggaggctgtcgatgatgatcagatctacgcatctgagaatgcaaaggtatgtgccatagtaaaaggttttccgggctacgagcgttacacctatgagacagatgcagacaaaaatgtgaccgagcaggagaaatacctgatcgttgcaaattatgctacggttgtggaaaagttcggcatgacaccgtacagtgtgtggatgaacctgtcaaaaggaaaaatggtggatgatatatacaaaaatttaacatccgcgcagcagcttatagacgagaataaaaactcagccacagtgcagatcacaaacggtatgtttacattaagttttatactttcactgatagtgtgctcagtaggatttttgctgtattgggttatgacactaaaacagagggagctgcagtttggtatataccgcgcaatgggaatgagaatgagagaggtaaaagcaatgcttttaaacgagcagatatttttatcatttctgccgcttcttgcgggagcaggcataggtatagctgcaacagcgatgtttgtaaggctcatatcgatcatatatctgccgcagaaacacaatatcggagtaaatgtatatatttatcaatctgatatgctggagcttgcaggagtacttttcgtggctgtagccgtatgctatgtggttatcagcagactgcttaagagtatgaagatagcacaggcactaaggcttggagaagatagttagcagataaaaatgattttgtggtagtcggtagaaagtttttatagcatggtaaatgaggtcgtgacatatggaaaatgcgataattgctcaaaatataaaaagatatttcaaggcgggagatggtacaacagtccacgcacttgacggagtatccatggagataaaaaaaggaacacttgccatcttaaaagggcgttccggctccggaaagaccacacttcttaatatccttagtgcgcttgatatgccgacagagggaagtgtgcagtttctggataaaaatctcgagcagatgaccgagaaagaccgggaaatgctaaggcggtatgagatgggatttgtattccagtctatagcactaattcccacgatgacggcatatgagaatgtggaatttgcccttagacttgcgaaaaataaacgtcagatacgggagaatttgactgatatggataatgacattggagatgcaaaaaacgatgtgataaatgagaatacgcatgacagagtatcagagctgctggagcgtgtcggactctcaaagcgcatggatcatatgccggaacaactatcgggaggtgagcagcagagagttgcgatagcgcgcgctgtggttcatcgcccgaaggtggtctttgcggatgagccgacaggagcactcgataccgcttctggatttgaagtcatgcgattgttccgtgagttgatagacgatgaggacatcacaatagttatgaccacgcacgatccgaacctgatggagctgggggatgaagtgtttgagcttagtgacggcatagtaatttaaattaaaaggggggaaaaccagatgataaactgcgatggactggtaaaaatatatgagacagacgataaaaaggtgatggcactggaggggcttgacctgacggtggaaacaggggagatgcttgcggtaataggaaaatccggcagcggaaaatccacccttttaaatatgataggaggactggaaactccaacggctggagtgctcactattgacggaaaagacatttccacatattcagaagctgaaatggtgagataccgcagggacaaggtgggctttgtgtggcagaaaagtgccaaaaatctgttcccatacctgactgtgctgcagaatgtcgaggcagtgatgatgtttgaaaattcaggtaataccgataatttaaaacacggagaaattataaaaaaacgcaaggataataataaaagctatgcccttaaactgttaaatgcagtgggattacaggagcataaggataagcttccggctcagctatcgggaggagagcagcagcgcgcagcgatagcggtggcactggcaaataagccggacatactgcttgcggatgagccgaccggagctgtggatacaaggactgctgatacaatctatgagctgtttcataagctgaacaaagagcttggtataaccatcatcatagtgacacacgatatggcacttgcaggtcgtgtagaccgcacagtgcttatatctgacggaaaggtaagtacggagaaattgaagaaacaccctgcaatggaatatacggtattggacaaggcgcacaggataaaactcactgatgagatgcttgaggcagcggggatagagtctaataaggtcagggttgatgtgcaggatggaaggcttgtgatatcgcggatttaagacatattaaacgtttagtgttatagagacacaaaatatatcattttcggttttaacagagataaaaccactatttttatttacgcattctttgacattttcaagcccatatccgtggatatctccggctttttttaccgaaaccggtggaattggattggatatttcataaagcagcacatgatttttctggcgcagcgtacatgagatggatggtttttgatgagccggaaaagcatcgcaggcttctattgcgttatccatagtgtttccaatgattatgtacaggtcaacaggcgaaatgttaaggtcagtatccagccatagattaaagtttatggagattcccagactgtctgctttattagagccatagtttaggataccgtcaacaatggaattaccggtatcaatcatttggtcaaggcttgaaaactttttctttaaggcagagagctggctttcggcttcatgtcgtgttttcgtagaaaccagattttccattgccagcatgtatttttttatatcatgccaaagtgcgcgggattcgtcctgacgagcaatgatatcctgatagtaaagctcctgtttggcaagctgctcctgcatacagagctgatttttctgtaattcataagatttctttactatttccgtatatccacaaaccactatattgataacaagcatacatatggtggtcatcacaaaggtggagtatttaccattgtcaataaaggtagtgtactgggcaaacagaataaatatgcttgacagattgcagagcatgagtggtatggcatgcagtagagcctttgaatcaaatcgggcattggtaaataaaataattatgaccagcaaaaacagatgaataatcttgcttgtggtattgtagataagccgtccttcacttattcctaaaagttcatttattgaaattccaagtctggaaagtacaaacgcaccaataacatcggaaaacatcgacgtgacaaaaaataatataatagtataggtgatttggaatattttgcatttgaagcagaaagtatagcataaaaacaaaaataagctgataatggcaagccgtataaacataggtgtatatagggttgatagcattatgaccgcaaagagtgatatgcaaaataggataatatatctgcgggaagggtatacaggtctaacctctttatgaaagaagtagaaaataagcaggcattctataataatggtatatatttcaattggaaaattcatttgatggtacctcgtatcaaattgttaaagcgctcttggaaaatggtctgttttttccgcgaaagtggaattttgcagccgtcagtcatagtgacagcaagtggtgtaaagctgtccacataattcaaattgatgcaatagcttctgtgaatctgtacaaatgaaggatatgaaaaaaccgaaatcatattttccattgaatcctttatctccaatgtggatgtatttgcaaaatgaaaaataatgtgccggttcagactctcaaaatatatgacatcgtttatagaaatcattttctgagttgaaccacacattatcgctgccttttgcggaagaatctcgtcaagagcctccctgacaacactttgaaacattgtaatcgttatcggtttgcatagaaatcgaaaagcaattccatatcctcggactgcatactgcagtgcgtttgtcgtaaaaactattacaggacgaggagaatatcctgctaaaatagagccaatttcaaaaccatttggcttatccatttctatatcaagaaaaattaaatcataaaattgggatttaaaagcctcaagcaggtcagaggcagacaagaaagtagaaatattgtatggtaatttgcatgatttgcagtaattgtaaagtatatcaatatcttgttgttcatcatcacaaatagcaatattcataaaaataatccccttatcaaaacaattaagctatgaagattataaattataaattttgaatttacaagattaatttaggtttttcaaatcatcccaaaaatgaaattttaaattccaccaccaccatttggtggtggaatttactcccgcacagtaaaggtttactctttcatataaaaatggtaaggttatctttctttctgacagcagtagaaagaaggatatccatgagtaaatatattccaggaaaccagaagcacctttcccttgaagaccgtatctatatcgaaaacgaactgaacaagggagaaacctttaagaacattgcccgctttctttgcaaggatccaacaaccatttccaaagaagtaagggctcaccgtctatccgactggtatcacaaaggtactttctataatgcccataacttttgtattcatcgcttccattgccggaaaaccaatgtctgcggaaaaatcattctctgcgatgtaaaatgcacttcctgccccacctgtaatcaaacttgcaaggattttgtgaaggaacagtgcaaaagactggataaggcgccctatgtctgtaatggctgcacaaaaaagataaatcattgcaccatcgcccagaaatacagatacgatgcacgttttgctgatagaaaataccgtgaaaagctttccggttccagagccggtataaacatgacaaaacatgaattacgcaaaaaggatggcattgtttctcctttaatcgagcagggacaatctccatatcaaatcattaccaatcatccagaactggatatgtcagtccgttccttgtacacctatctggatcaaggtctgtttacagccagaaacattgatttaaaacgtaagcccggcttcaagccacgaaagtgccataaaacacagattacaaacagaaccgtcttcgagaaaaggttattcagtgattttagtgagctgcagttatcctcttttgtagaaatggatacggtacactcatccagagaatccaacaagacgttactgacctttttcttcactaaggaaaagctgttccttgcctttctcctgaatcgttgtactaaaggcgctgtccggcttatttttgaccgtttagaaaaacgtatgggcacctatgagttcttatctgtctttgaatatatcttgacagacagaggttcagaattcggagatcctgtcgctcttgaaacaggactggatgaaattcagcgtaccagcatctactattgtgatcccatgcgtagcggacaaaaaggaggtcttgagcaggctcacaccatgcttcgcatggtgcttcccaaaggaactagttttgaatttttgacacaatgggatgtgaatctaatcgtgaatcacatcaactccactccaagggaaagtcttaatggaagcacgccttatgacgccgcattagagacactcggaaaagaaaccctaaacgcatttcagcttaagcgcattgaccctgatttggtcaatctaacgcctaagctgattcgcttcaaccattaacaaccacttagaaatctgctgtcggactggaaattaaactttcacattttcctcacatgaccggtggaatttagtctcgcacactaccttccagtggtccgtttgtcataccatcaaatcagttttttccaagaagttactcctattataacagaaataagcgttttgagcttataaaactcttagaaaatcaagaacttttaaatgagtgtggaatttacttctgcactggaatttactttttcaagttagcttttcaaatcatccatcagattgagaacaatatgttttttgtcaattgataattgtttggcatagagagctatctgattatccaattgctgactttcagaagtatgtgtatcggtgccccaaaacaattcatttgcgtctattttgagagtattgattatttttgataaaacagaaagtgaaattttgctttcaccacgttcaatttgaccaataaatccgcaggagcagtctgcatattcacttaattgttcttgtgttagattatttttcaaacggtagaaacgtatgatttttcctatatgctttatgaattctgtatcctgcatgatttacctgccttcatatttaaactatagatattgtaggtaaaaaaattaatattttgaatatagtattactatcattttacgatagtaatactactatatatgcaaaaggtgtgtatatttatgtcgttagtgcatgagctattgtatatacagtgatgttgagtagaattgagagtgtaaagaataaaaacaaaggagcaaagaattatggttaaaaaaggtatagtaaaattttcaaaaatcgttgcaacatttacaatggtacttgctgttgtctctgtgaatgcaacatgtttctttttttcacatcagccagatatcccagactcattgaaaaaaagaaatgattaagaaagcaagtacactaattgttgagttttggattaaaaatgcaataatcaagactgatgataaggaatcatactgctatggtatggaattgattttgtctacattaataaatgttgcttttatggttatattatcatattacgttataggatatcctatagcatttattccgtacatagcagtgtatactccgttgaggttgacagctggaggatatcatgcacgtagtcatcttaaatgtatcttgtatacgcagattacctttattgtatttgtgatgtctgcattggcatttggaaaaaaatatatatggtgtttgatggtgttatatatggtggcagtgttaactgtactgagattggctccggttgaagcagaaaataaaccattaacagtagaagaaaagcataagcaacaattaaatacatggggatttcagactatcattttaattgtaattgttatagcagcaatttttggagtaatgaaaaatgaaatagtgctttgtgttatggctgctaatatttcggtagcgatttcgttgattcttgcaaaaattattgattaaatgtcaaacgtgtacgaattcgtgtcattcatgtatatatggttgaagatatctggattatcggatataaataaattaaaaacagcgaaattataatgctgagatttttattaaaatcaagaccaatcaaatgaaaaagtgatagataagggaataaagaatgagatacactttcataaaacaacatgatgcaacagactgtgcagcagcttgcatggggatggtctgtctgcactataaaaaagagacaacaataacaaaattacgtgacatgatgggaacagacctgaaaggaacaaaccttataggattgtcaaagtgtgcagaagaacttggatttaactgtcaggccgtaaaagtagataaagagggttttgttagcagatatacattaccggctatagcaaatatcgtgacaaaggaaggcttatcgcattttgtggtaatattcaggatcacaaaaaagtatgtgataataggtgatccggctaaggatcttgagagactgactatagacgagttttataagaaatttacaggagccatgctcctactgaaaccaaatagtgagtttgagcgtgaaaagataaagggaacgaagttatttgacagatatataaagctgctgcttccacagaagaagctgtttatatatgcgcttgtagcctcacttctggttacacttctggggattttatcatcactttttaacaatataatatatgatgaaatacttccgtatcagcaaaaagatgtattaaagatgatgcttgcggtatttcttggaatatcactgacatctacatttataagttttgtgagacagtggattctcatgcatctgtccatcaaaattgatataccacttatgcttggttattttgagcatatatacaaattaccgatgaaattttttgcgagccgtaagaccggtgatattacaaccaggttttcggatgcatttaccataaaagacatatttaccagtatagcattatcactgatcatggacatatcaatggctttgataaccggagtaatactttttcagatgaacccaaagctttttgcagtgatcataatgatgacactcataagtattgtgctcgtatttatattcaagcagccatataagaaaataaacgaagaacagatgcagcagtcatccatactcaactcggaaataatagaagggcttcgcgcagttgagacaataaagggaaatgccaatgaggatatagagctcgaaagcatagagcgggaatacataaaatctcttaggataagttataaagagggtatgctttcaaatgtgcagtcaacaatatcgagtgttatatcgggagttggtaatctggtgcttctgtatgtaggaataatgcaggttataaataacaacatgacgcttggaagcttcatggcatttaacacacttgcaggatactttatggatcctataggcaatctggtaagccttcagttatccattcaggaagcaaatatttcaatgaagagactttctgaaatcatggattatgagagagaacagaaaagcgagaggcagtatcaggagatatcaagcattgatggagatattaagcttgagcatgtcactttcagatacggaaacagaaaaccggctttggatgatgtgagctttataatagaaaaaggacagaaagtggcacttgtgggggcaagcggaagcggaaaatctacaatagccaagctactgctcaaatattatgagccggaggcgggggatataactatagatgggatggatatattagaatataagaatgacgatatacgtcatgcgatatcatatgtgccacagaatatagagcttttttcaaaaagtatttatgacaatataagagttacgagacagagtgcaacgcttgacgaggtaaaagaggctgccaaagccgctgatgctcatgaattcataaagagactgccgatgcagtattatacctatctcgaagaagccggaaatggactaagcggtggtgaaaaacagcgaattgcgcttgcaagagcatttcttaaagaaaaccagttttatatcatggatgaatctaccagcaatctggattttgcaacagaaaatatcatttttgatatgatatacaataaattcagaaaaaagaccatgctcattattgcgcacaggcttgcaacagtaaaaaactgtgacaagataatagtcatggacaaaggaaaaattgtagaacagggaacacatcagcagttgctggagaagaaaggacagtattacagactgtgggaaatgcagcagggaaattttgttatcaaagaagattcagataaggatgaacagtttgctgagaactttgagaatgatgatgagggtgtaatgagctacacctagatgattaatttttgtatgtaaaagctttacatagagtcaggactggttgcaaacaggcgtgacaaaaataaaacaaatgaaggaggtacgcatatatggatatgtgttacgatggagcactggtgctccctagcagttatgctgtaatgaatgaaaatgagatgaattatgttgaaggaggaatagctgtatcaacagtagtaggtatagttactgcggtaatagccacatatggtgccacatatggtgcaggaacggtatgtggtaaaagattatattatgctggcatgaatactactcaaaaatggtctaagtggaaatggcagactagagctattgtaattggaactgctagcagtctgggacttggtggtgccattgcaggtactgtttttatgcttggtttggaaaatcagttatatgatatgatgtagtataattatatttaagttcatatatggatttacaatccatatatgaacttgatggaggaatgaatatgaaaactaaccttgaacttattttactagtaattaactgggtaattgttgcaatacaggcatttactatatttttatatggaaatagtataggtttatttattattatgttgcttgcattaatagtacaagtatttagtgtttatgataataaaaagaaataattaaaatatatgaacataataaaatttttcgagtattatatcggaagtttgcaatctggtaagctttcagttatccattcaggaagcaaatatttcaatgaagagactttctgaaattatggattatgagagagaacagaaaagcgagagacagtatcaggagatatgaagtatagatagtggcatcatctacacaacttgaaaaggagatattaatgaaaaaatatataatttggaattcagtggtatttattttcttttttggcattatgtctgtatatttagataagattccattggtagtttggatgctggtaggggttattatagaagttttgtttagaataatatggggatttatagagaaaaatgataatgataatataactgataaggattgtgaaaattataataaaaagagaaaaaaatataagggcaaaattaatgaataaaataacaattttagaaaataaaacgttaaaacttcaaaatgtattatctgtgcaggtggatttagaatctgaatcggatgaactctttgatattgaaattaataaattgaatacttatatacaaactcatggagcaaaacagattgggccattaattcaggctacgagttttgaaattaaagatgacggagctgtagatattaaaatgcagtttatgcttcagacagacaacttcatccacaacgtagaaccaccttacaagatggattccattttacgtgtaaagaactgtctctatgcacgttatatcggatcggaggataagctgaaatttgcctatgacaagctcggagtttatgcatttgagaatgacatagagcttgaaggctgcaattatactatctatgtggacaggaatgaagaggatgaaaccatggttgcggatgtattcatgcctgtaaaggaataaaagaaatatgagcaaaagagtaaagagtttagatgaaataagggaatcaagactgctgtttgataaaaatccgccggcattcggctatatacttataacagttgtagccgtttttcttattgtggcagtagtatggagtataaaaacaccaaaggtgtataccatacaggcgcagggaactgtgacgaatgatgagtcaaattacgtcatgtgcagctatacgggtgagattcttgacagcaacatggaagagggcgcacttgtggaagccggggatgtgctttttacaattaaaagcactgattatgatctgcagcagacacagcttgaagacaacagaaaatcatatgaagaacagatatcacagtatagtcttcttataaaatcaataaaagacgataccaattattttgacgaaacaaaagcggatgacggtctgtactggagcctttttgaaacctacaaatcacaggtggaacagaataaggttgatgtgtcaacgtatcaggcatatggatatactgatgagcagatacaggcacagcttgaaactaatcaggggaaaatagacgaagtctattattctgcaatacagtcggcagaagccaagatcgcagaggcggaccagcagattaaatcaattgatgcgcagcttgcggcagtatcgggaggacaggattcctatgaagtaaaggcaacagcatcaggcgtgcttcatatgctgggtaattataagagcggaatggttgtacagacaacgaccactgtggcaacaatcacaccggaaaattcgcagagatatctcgaagcatatgtttccacatctgatatggccagaatgcatgagggagacagagtgcaggtggttatggacggtctgtcccagaatgtctatgggacgataagcggaagcgtatcacggatagacagcaatgtcactacacaggaagggcaggatggagcaacaagccgggcatttaaagtgatgatagtgctagaccaggattatgtgctgagccgtgagggagacaaggtagacgtgactaacggcatgacggcggctgcaagaatacagtatgataaagtcacatattttaactatgtgcttgagaaactcggaataaaaaccggaaaatgacatgggataaggttatgaagttaagaaacagaataagaatatttgcagttatatttatactggctttgggaatggagtacttaccgatggcggtatatgctgcagaagtgacagcggaagaaagcgatatggcaaatgatgcagaaccggatatggatgaaacaccggaaccggacaatgcatcggaaacggacaaggaagacaaaacagacgtacaggatacgggacagaatataccggtaacggatatcgagatatcagatcatgaggaggaagtggaagtaggaaagacaataaaccttacagccacagcacttccggcgaatgccacggaaagcacgataacattccgttcatctgatataaatatagcaactgtgacttccggaggtgaagtaaagggtatctcaaaaggatatgttaccatatatgtatctgccggaagtataataaaagaggtaaatctgacagtaaaagtaaaaacaaccggaataaatataaacaaagaatatctcgtaatgaagccgggaacggcatttaaactgagcgtatctgtgtttccggcagaggcagagcaggcggtttcatacaaatcaaccaacacatcagttgcagcagtatcaggcagtggtgtggtaacggcaaaacagacaggttcagctacaataatagtttcaaatggggatttgtcgggcgcagtgtcggtaatcgtaaacagagatacggaaagttctgtggctgaacctatggcagcggatagtacagacgcagaaaatacaagtgaacagacatttgatgaaaatactgatgtatccgaaacacctgtaataagtgagcagatgctatataaactgtacacagcaggcagatcgatgaaagtgaccggagacggctacagcatcataatagacggaaaaaagatagtaaattataaaaatgaacttaatacggatatagaactcgaaagggcaggagactgcataaaattcaatctcaacgatggagagtatctgtgcggagaagtgacactgcacatagatgatgtaaaaggaaaatatctgtatctatataataacgtaaagcataaatacgaacttgtgagtacaaaagacatgagcgggcttaatttaagcacacctggaaagtatatgatcacggcaaagcccatcagagagggcaacgcagcggtcagatatatactgattgcaggtggaatcggcataattgcaggaatagctgtgtatgtggcggtaaagagaagatactggttctggtaaagctgtaggagttacaattattagaggatgtataggcggaggaggtaagtgctatggaatacttgaatttggaaaagggaggacttattactatcttgattccacttaatcttttaattggagaatatacattgttttttcgcttgaatggatggagccggaaaataattcacttaatcataggtgtgattgatctattttttgtggtggcaacaattgctagtggagagcatccatattatccatttgtgattttcggtggaatgttaattggaatcattcaaagtgaatggtgttatagaaaaatcagtgaagaaacaaattgttgggacaaaatagatatattgtttaaaaaggggagaatttggatgggagtgatattaattattattgaaatagtgattagaatgtcgtatccgtcaatgtttatggtattaccattaataacacgtatcttttcatatatcattttagctgtgttacctattgaagtgatagtttttaactgttttcttgtaaaaaaacataatggtatgacaatttaatatttttagaaagcaaggtaaaaacgtgccattcatgacaagaaagtgtcgatcgtgacctactttattaattttaaagtgcatgaagggagtaatgaatttgaataaagagattgttgaaggaatgtacatagctcttatttttattgcgggatactatttagtaaagacgaaaagaattaatattttgtggaagatattggcagctgtgaatatactttcatgggcgtgtttattagtaatattagcactagatataaatgtaagtgctgattttatatccttaaatttagcagcatgtatgtcgttggctatttttacaccaataatatggttttcagatagaaaaaatatggatatctacagtttatttggaaatataggatttgtattagtacttaacaaggaagtaaatcaaataaaacacagtgccagactaaaagaaaaccttcagaaaattctaggtcttgattgttatcataagacatggatcacaatatcgaaaccaaaagatgaagaaattacattgactatgttatttttcagtaaaaaggaatttgcctgctttgaacgaaaaattgataagaagtatatagtagaaaaggaaaatggatttggaacattggttactatgcaaatataggagagaagcaatgaacagagatgccaaacagcttttttataagatttgcttctaaaaatgaggcgtggaatcgaacgataaaggtgtaatgagctacgcctagatgattaatttttgtatgtaaaagctttacatagagtcaggactgtctgcagacgggaatggcaaaataaaacaaagaaaaaaggaggtacacatatatggatatgtgttatgatggagcactggtgctcccaagcagttatgctataatggatgaagaggagatgtgctatattgaaggtgggggaacagttaaggttattgcatcgtcaagtacagttagaactatatgcagatctagcgttgcattgattggaaccgctataggtgaagcatttggaggtcctattttagcaaaacttattactggagctcttgctactttgatttatgattttattattgatagatgtggagttaaatatccaagtattaataaatcatttactaaatcaatatttcctaatgtaacatttaatctgaataaatatgtttaaaaattaatatattgacttacaaaatgtgtattaaaaaatagtagaaatgagcgttttatgagtaaaaagttaacttttggatttttaaaattattaacctcttttattgtttctttcttatttttcgagatgtctattggagctatgctgataacatatgcttttttagaaataataagtatttcatcaaaggatgatgttgccaaatggaaaagtagtaagaagtatacaattgtattatttatatgtattcttggtgctattatgattttgttgggattgaaaatgtttgataatcaaatgtttataattataggtggaatatgctttgcgccaacaattgccttaataatagtgaaagattttctcgaatacataaatgtagataggaacaacaataaaaattaggaaaagagttgctgttgaacaggcgcagagttagtctctctacgcctgtttaaatgcgtgccttattcacttaccacaaccttacaatccttcttaaagcatgcaattccatacttgatgaaattgcgcatgccatcctgcttcagcttatccacatatgattttttctcaatctggttcagtgcctcatcgcaggctgcatccatatcgccgttttcggcatatttaagctctatcacgatgccggttcggttgtttggaacttcaacgaggatatcgctgtagcctgtgcccgattcggtgtttgatttgatgagccagcttgctttgtagcccaacagaccgagcaggattccgtggtagaaattttcttttttatctttagcaactgcggtatcccttatgcttattgtattccagagataatcgccgaaaagctgctctattttttcagtatccttctccacaaatgcattgcagaattgttcaagtgtctttccgtcatttgcagttgtatcgctgaaccattcgcggattttttttatgaaaaggtttttaatctcgcggtttggtattgataaacgcaccttgccatcgtcagtcacgccctgcttggtcaggtaaccggtggtgaagagcacactccacaggtttgcaatgcttttgtcgatttcatcgtaggtcagctcctgggatatttctttttcaatgtattcgcctgctatcaggcgctcaatctcatccttggtctggacatcggctttgtcaatgaagcttcttaccagagcatttccgcttgaatttgaccagaagtcctgcggctttgcagtgggatctgcgcacaggctcttgcaatatcttatgacatcccacgggcagtagatatcggtgttgccgaaatgatagccgtcgtaccattcccttatatctgcataatgctctgaaagattaaaatacttaagtatttcctgaacttctttatctgtaaagccaaagcactcgtcatacattgaatccatgattgaaacgacttcaaagttgtttaatcctgtaaatatgctttccttcgatatgcgaagacagcctgtcaaaatagcaaactgtaagtaatcgttggtctttagtgcctgtccgaacaagcctcgtatgagagagaccatctcatggtagtagccgttctggtatgccttgtcgagtggcacatcgtattcatctatcaggatgactaccttttggccgtaatgcttatataaaagctgggaaagaagctttaatgaagcggtaaatgtatccttgtcaaaaataaactttcccttttctatatgaagtaatcctttgaactgttctttttccaaaactgtcaatttatcactttctgccaaaaaggagaatttgctgatttcatttcctataattctggagaatacctgaaatgcctcatcatatgataaaccctcgacatccttaagtgaaataaatatcacaggatatttgcccatatgctcatcacaaagagatttattttgtgaaatatataatccgtcaaacagtgatttgtccgtgccaatctcgaaaaatgagcgcagcatgttcatgccaagagtctttccaaagcgccttggacgggtgaacagcgttactttactccaattgtttaaagtctgctcgataagcatagttttgtctatataataaaatccagaccttcgtatatcttcaaaattttcgattccaacaggcagttttaatatttccatgtgagcctccccggttaaaatatgttcgatacattcacatatagtataactgatttttagaggaattacaatttctattgactatttaaaactgaccctaaaatgaaagtaatgttgcctaatacttgaacaatatcatggggttgtctataatgtagtaaaaagaaaatggagttttaataaatgaaacgatttacagcaatattacttacaggcatgatgatatttaccctcgcatcatgcggcaaaaaagcacaggatacaccaacagagcctgcaacagagacacaggctgcagagaaggtcgagatgcctacggaaacggaagccgtgacagaggtggtaacagaggctgcaaaagatacgcagcagacagaagcacagcaggaagaacagactgccgaacagcaggacgaggagcagaacaattcaggtgaaaataattcctcttatcagtatgtagaaagagcatcctatgagaatggagaatcagtgtcactaaatccttcatggcagtatgcagaacattcagcgataaattcaggctgtgcggtcatgtacaaggctacagcaaaccgtaaaaacatagtagtaggtgtcaatgccggacacggtacaagcggaggaacttcggtgaagactctttgtcacccggatggttcggcaaagaccacgggtggtacaacaggcgcaggtgcaacaaaagcagtagcagtttcaggtggtatgtcttttaatgacggtacaccggagagctctgtcacactccgtatggcgcagatattaaaggacaagctgcttgcggcaggctatgatgtgcttatggtaagagacggaagtgatgtacagcttgacaatgtggcgcgtactgtcatctgcaataatgcggcagactgtcatattgctctgcactgggatggcgacggactaagctacgataagggctgcttttacatatcagtgccgggaggcataaagggtatggagccggttgcatcacactggcagcagcatgatgcacttggggcaagcctgatagaaggactgcgcgctcatggagcaaagataaacggtaatggctctatggcaatagacctgacacagacctcatacagcacggtaccatcagtggatgtagagcttggcaacgcatgctctgaccacagcgatgccacacttgaaaatctggcagacggactggtgcagggagtcgagggatatttttaaatttggactaaaaagctgtatttaaaaaatgtttgtcttatcatgggaggagaaaaatttatggtaaagatttttgttacaggagataatcatattggaaaaaaatataatcgatatccagaagttaaagaaatattgatccagagtcggtttgattctttgaagaatatggtaattaaagccgaagaagaatcttgtgacttatttattattacgggagatctttttgacagtataaattcaataaaagtttctgatgttaaaagagtagttgatatattatcaatgtttacaggtaatgttattgtattaccaggtaatcatgattattatacaggagatgaaaaagtatgggacaattttaaaaaatgtcttttaagcatagataataatattactttgataaccgagttcaagacatacaaatttgaagttggagaagataatgttgtgttctatccggctttttgtcagtcaaaacattctaaaaagaataatttagactggataaaacattctaaaattaatgaatatgatggtataaatattggaattgcccatggagcattaaaaggggtaactcctgatataaatgaagattattttcttatgtcagaatcagagttatctggaataccggtggatatatggctattaggtcatacacatataccatatcctaatgatttaaaagaggatgaggatacaaaagggtacaaggtat

SEQ ID NO: 658 - DNA, 674715 bp, Agathobacter rectalis
  source 1..674715: mol_type = genomic DNA
cctacaaacaagtcaccatattttttaattaattttttttcaattacttcaaatactatcttgtaattatttacatctctacaaattaatgtatcaaaaacatcaaacgatattattttatgcttatctatcagctcatatattttggttttatacattccttcgtcccctagtaactttaatattttaatgtgaaacaaaatgattttcttaatgttttcttttagagttatataatccaattatactttattcaaacctagctattactctttaaatttattgtgcctcttaataattatcacttacacttaaaactattttcctttgtacttatatgccaatctaagaatttttctatcgtcgactagatatctcttagcaagtcttttgggatcctgcgttattctaaacaaccactccaacccatgatttgccatccatttaggagctcttttaatatttcctgcctcaaagtcaagacttgctccaagtcccaaagatagaggaacacccagcttctcacaattatgatatttaaatttctcttgttttggacatcctagccctacaataagaatatgcggatttgcactcttaatcatatcctcaattttcttcatttcatttcatctttttcaaatccatacggtggagaatatgtacctacaacgtttaatcctgaaaattttttaataagattctttgcctctgttgcgcccaaaagaacatggtatatccactttttgctgccaattcacaaatacgtgggaacaaatccgaccctgatttttttccttaatcggagttccataccattttttatcctttgtttttatattttcttattatcggaacaatatttacagcatcattccagtatctcttaatcaatcttttcggatcttgagttatacgaaacagccactccaatccatggtctgccatccattttggagctctctttacgttaccagcctcaaaatcaattgttgccccaatcgaaattccaagagagactccatattcttttagatgtctgtatataaatttttctcctttaggcgaccctaaagaaactgcaaaaatatccggggatgctttctttaccattccggctatttttaacaactcttttctatccttttcaaacccaattggaggtgagtatgtccctactatgcgcagtccatgaaatttttgacaaagattgtttgcagcaatttctgcaattccctttcccgcccctaatatgaagatactatacccatttttggcacacatactgcataattgtggaaagaaatcagaacctgatatcttttctttaattggattcttcaacattttagaaatccatattaatggtttcccatctgcgagtatcagatcagcatttgcgtatatttctgcaaattctttgtccttttccaaaataacaatatgatccaaatttggagtgacaatatacgaattttcctttttttctatcaaatgttgagcctcttctacagcttctgccatagtaagattatctatatatgtgtttaaaaaactaattctatccatgatttctctccattaaatattacagaggtaactgtcgaacattccttttaatgtatcaaaaatactgtacttaggtttccatcccaattctttgcttattaactcatgattgcaacagatcacctgtgtatcaaccggtctgaatctttctggatcaatttctacagtaattttctgcttactaagcgatacaatatagttcaacagctcacttagcttataggcttttcctgaaccaacattataaattctggtacaatctgaattttctataatcatcctataggctcttacaatatctctaacgtcgctgaaatcacgctctgcagccaaatttccaaccttaattgttcctggtttaccagacctctcaattaccgctgcttgtttacaaaagcttggcagaacgaaggaatccctctggcctatacctgtgtggttaaatggccttacacaataaatttgcattccatacctttccctgtagacttcagcaaacttctcctgagccattttagagataccatatggattattagcatttaatattgtctgttcgttcattggcttgtctgagactgcatattcctcgcttgaaccaataaacatcactttgggccggttatctatttttcttgctgcttccatgatattaagtgccccaatcacgttcacagacatcgtgatttggggaataccccaagaagcacctacactacttattgccgcaagattaatgatcatatcaggcttcttttcagaaacaatcttttctatgttctctgcattcaacaaatccgcttccacaaaatcgactaacttatttaggctttcactcttaaccttatcagagccagcaacgacatagccattatctataaattcctgtgccagatagcttcctgcaaatcctcctataccaaaaatgaatactttcttcatacgttcaaacccctctccataaatcaaaaaggtacagacatgactttttctgttatatctatgccatacatgcattatgcctgcaccacttaatatttattttttctgttctgcttccttcttcgcaagttgcaaatcgtgttcagccataattgagcacagctgctcatagcttgttttctgaggattccagccaagcacagtctttgctttagtcggattaccccacagattgacaacatctgtaggacggaaccactggggatttacgcaaacaagcatcttacctgtttttttgtcatagcccttctcatccatgccaacacccttccattccagttcgatgccatcatttgcgaaggcaagtgtggtaaattccctaactgtgtgctgcacaccggttgcaataacaaaatcatccggctcatcctgctgaagaatcagccacatacactctacataatcctttgcatatccccaatcgcggagagaatccagattgcccagttccaaatgatcctgaaggccacacgcaatacgtccggctgcaagagtaatttttcttgtaacaaaattatctccgcgacgttcggactcatgattgaacaaaataccgttgcaggcgaacattccataagcctcgcggtattccttaatcatccagaaaccatactgctttgcaaccgcatacggactatacggatgaaatggagtagtttcactctgcggacattcctctaccttaccataaagctctgaagtagatgcctgataaatacggcaggtcttttccagtcctgcgatatgaactgcttccagaatacgtaaaactcctagagcatctacatcacctgtgtattcagccgcgtcaaaggacacctgcacatgtgactgcgctgcaagattatagatttcatccggtttcacctgtaaaacaattctgatgatactggatgaatctgaaagatcgccctcatgaatcgtaattttatccataatatgatctatgcgtgctgtcgttgatacagatgcacggcggataataccatgaacttcatagcctttttcaagcagaagttctgcaagataagaaccatcctgtcctgtaattcctgtaatcagtgcttttttcataatagttttctccttgttttaaattatttaatcagatgcattaacatctaatcttcagtaatgttgtttctccaatcacctggcatcttcccagtcctgccggaagaaacattgtctctcctttattgaaccgtaccggcttctgatctggcttggttgttgctatttctccatctccatcaatacacatcataatttggaatgattcttctaagacggaaaaggaaaaaccctttgtggcgtgtattctttctgcctcaaagtatttgcaacgacagatcaattctcttgaacatccagaataatacctcacaacacggcttttctgtgttatatcttcttctgcattcatgttcatgacctgaacagccttatcaaaatgcaactcacgcttctttccgtttttgtccactctgttgtaatcatatacacggtacgttaaatttgagctttcctgaatttccgccaaaaggattcctgcgccgatgccatgaactgtgccagccgggacgaagaacaaatcgcctttatgaaccgatactttctgcagatgcttatcgagagttcctgtttctacagccattctcagcttttctttggtaaccttgtgtctaaaaccgtagatgagacttgcaccttcttccgcatcgatgatgtaccacatctccgtttttccgttctgatgctcgtgttctcttgcatatgcatcattcggatgtacctggacagacaaatctttctttgcatctataaacttcaccagaacaggcaactcaccattttttacttttgtcccaagatactccggatggagcttcagtacatcagcaagcgtctttcctttgaacttgccgcttggtacaacgctcggaccatccggatggacggagcattcccacgtttccgcaagcggtgtgagatcaatttttttaccatactcatccctgagacgtgttccgccccagagataatccttccctactggggaaagccttaaaatttccatttatgaactcctaaactttttgaacccgtatttcttcttacatctcaacctttatcttgtcatgggcactaatctcttcgcccaactgaacctcgatgatatcaagtgttgtaagagcctgaacggtgtgtttacatcctgctgagattgtgatcacatcacctgtgcgaagaatctgctccattccgtccaccattgctttacccttaccagaaacaactgtccatacttcttcacggtgattgtggtaatgataacttaagctctcaccaactctcatggagagcttcacagtcatggaaccgggctgtacatcaataaccgtatagctgccccaggatttctctgcatacatagcatctatttctatcttctcaacatagggtttcatataaccgctacgttccttatccgaaatcaggatgccatcaccactggcggcaacaatcatgtctttgcagcccatgcagaggattggaatgttcagctcgttcacaatatttgtgttaacacaggtttcatcgagaatagctcttcccttcgtttgatcagccattacctcagccatcatgttccaggttcctacatccttccagtccccacggtacctgaaaacttgaatactctgttccttctccacaacagcataatcgaaactgatctttgtcagtgtgtcatacttgttgaaaagatcacggtaatcctcaaattcaatcatcttatgggctgtgttaagcagatatccgagcttaaaagcaaaaatacctgcattccacaaagctttctgtgtcatatacttcttagctgtttccgtatttggtttttccttaaattctgaaactacactgacattctcgccagacaccggaatgatataaccatacttttcactaggatatgtcggctcaattcccagcaatgtcagatttgactttccttcttctgccagcttctgaagctttccaaccgcctcgtaatatgtattatcaacatatggatctaccgggcagacaacaactgcctcattctctccgacgccaagttcatcatgaagataggatgctgccagagcaattgccggaaatgtatcgcgacggcaaggttctacacaaatagcaaccttctccccaagctgattcttgatagcacttgcctgtgatttacttgtggcaattgtgattttcgcatttgcgtctactgtcgtaacctggcgatatacgcgctgtaccatggattcataatttccattttcatccttaaacagtttgataaactgcttgcttcttacatcgttagacaatggccacagacgcttaccagaaccaccagaaagtaaaataatattcattgttttttctcccatctattacttcaagtactcttcagcactctcgcaaatttccgcttcaatcttttctgcagcttccttgttctctgcactgacagaaatataggtcttgagcttcggctctgtaccagaaggacgtaccacgatagagcagttatcttccagcaggaacttcagcacatcagacttcggcaggccatccagacctggtgcgtagtccagcagttttacgactttcttgcctccgaactccttaatatctccacggaatacctgcataatgctctgcatctttgcgaaaccagcactaccatcaaattcatagctgtgcagggtattcagacaataaccatatgtcttgtatagctcgtccagcttatccagcaagctgatacctttggcagcataatagctgaacatctcgcaaatcatgtaagcaccgtccacaccgtccttatcacgaacgtaagaaccggtcagataaccatagctttcctcaaagccgaacacatagctgtcgaccttgccctgctgctccaacttgccgatctgctcaccgataaacttgaatccagtcagcacattgatagtgcacaggccatagtgagaagcaatctgctcacccatgtccatcgtaacaatggtcttgaccatgacagggtcagcaggcatctttccatgctttactctctggctgcaaatgtagtccaacagcaacataccagtctggttaccggatagcagttcatactcacctgccttgttcttgacagcaatgcccacacgatcacagtccgggtcagttgcaagcagcaggtcagcattgcacttcttggcgtattccatacccagtgccattgcttccttaatctccggattaggatatggacaggtcgggaagttgccgtctggctgctcctgctccttgaccacggtaatgttggtatagcccatttcttttagagtacgagttacaggctttaagccggtaccgttcagtgggctgtacacgatagctacgttcttattaacttcttcaccaaacagaacggactggctcttgacctgctccacaaaggcgatgtagacttcatccggaatgtactggatactgccgtctgccacacctgcttcaaaatcgctagtcttaacatctgcaaaaatatccagcttttcaatttcggctagaatctccgcagcagcctcggtcgtaatctggcagccatcagcaccatagaccttatagccattgtacttgctaggattgtgggatgcggtcaccatgacacctgcagaggtatgcagataacgggtcgcaaaagacacagtcgggaccggcatcaaaacaggccagatattgaccttgacaccattcgcaccaaacacaccggcagccacctttgcaaatacatcgctcttgatgcgactgtcatagccgatgactacagacggagtttcaaaattcttctttaaatagtccgccagaccctgagatgcctttgcaaccgtgtagatgttcatacggttggttcctgcgccaataacgccgcgcagaccgcccgttccaaaggcaagatcacggtaaaaagcatcttcaatttttgtatcatccagcgttttaagttcgacagcaacatccgcatcagcagttgcatttgccagccaacgctcatatttctttttaatatccataataatttcctcatcttctgtgcattttcttagtcacgctggaaaatatcgctcgtgtcaaccttgcaatactaagtttttccttacattgctccatcattccttaatactcctacggcagtctgccaaataatctttatatcccccttcacactccactccccaatatactgggtatccagcctcaccacttcctcaaagtccgtgatattgctcctaccactcacctgccacagtccggtcagtcccggtctgaatgacatcctggctctgtggtgtggttcatacttctcccactcatcgagtgtcggtggtcgtgttcccaccagactcatatctcctttgaggatgttccaaaactgtggcagttcatctatagatgtcttcctgataaactgtcctatgccggttttctttgttccatccggcagtatcctgttgcctatgattctcggatcgaagtccatcttgaacatcattccgtcgctcaccttgttttgtgccgcaagctccttctttcgctcctcggcatccatgtacatacttctgaatttgtacatcctgaactttcttccgtttctgccgattcgctcctgtgcgaagaaaatcggtcccggtgatgctatatagattgccggtcccacaaatatcgtcactatcaaagtgatgatgcatccgaccagtcctccgagtatgtccatgcctctttttgcaagaagctgtgtggtgcttgcataattcatacaggcggtgatgactgtgtagtcaccgattttttctatctgattaaagctgcctgccataaccttgtttttggtgatgcctctgtgaacagctattcccatctcaagaaatatgtctgccatttcatagggatattcgctctccgcacatggtgggataagcacctcatccacccattcctcacaggcgtagtccactatcccatcgtgatttgctactattggtatttcgcatattgttttgcccttcaaatcggcatctgttgccgctgccactatctgtgtgtatccaaagctattatcctttatttcctgaagtgtctcctcaaggagcttttccggtgctatgacaaagagtgattttttcgatgaagcaaagcttctttttttgataattttctttaacaccactctgcctaagtacgacacgagaatatatattggaatcatgatgtagtaagacatacgcgaatatatctcgcccatctgtgtagtgaacaggaagaaggttgttaatatttctacaagcaccacatgcttacatgtagctatgagctcatcgagatagccgcgcttcaatacatttttgaaggcatcggatactatttccacgaagaaatctatgagcagaaatgctgctgccaatatcctgtagtccttatctgtgtatggattgccaggtccaaagcgccatatgtatgaaactatgaatgctatctgcatgcacaggacatctaagagcataaaatctatatgcttggtccagcctcttcctttctttctgtacatttttctatgtctccctgtatttcctgattaccctatttccagttcatccctatgctgtcaagccttgctatgcgctctgtgtcgagcaccattccgctggccttcgggttttttcttttacatctgatatttgatatccagcgtcccagcttcaccccgtctgtggagtatgataccggtatgtccagattgccgtttttctcataatatgtttttgcaagctcaaactttctgttccactgtatggccgtcctgctttctgacctgtagcctatgctcttaaggcgctttagctgctcgtctgtcattgagcggctgttggtctggttggacagccaccgtccaagcggtatgccgtctgctgtgacatactttgcaggtacttcgaggtttccatgctccttgtagtaggcctttgctgcactgtagtactcttcccacttctgcttgttgtggtcccatatcatgccaagctcctcgagcgcttttctctgctcatcggtgagtgcctgctctatgccatacttttttaccttgaagcgcatgttattgatccatgagccgagcctgaagcctgtaggcgatacgtatttggccttgatgtccagattgccgtaagtattgcggtagcatttcagctcttcaattacctcctgccagcttgaatccgtaacatcccatatcatgcctatgtcgtttagcttttgtatcttttcccaggtgaggtttccggatatattgcctgacttcacacgcctctgggtgtttatccatgctcccagtgtgagtcctgactcagtgacatagctctttggtatcttgagattgccattttcctcataccactgctttgctgcctcatagtatgtgtcccaggcacttcccagattttcctgcaggcgcatgaatatctccctgctgtccttggtctcgtctatgatgcggaatctgtcgtcaaagtgttctcttggcgagtgagtgtccggatacagcaaaaatgcttcctgcatctcgtttttcaaacagtctatgcagtacaggctgtcaaagttgtttaccaggtcaaatatgaccggctgatttttgtttcctgctgacagtgctctgcctatctgctgcagatagatgattggtgacaccgtagggcgaagcagtattactccgtccacatcgtccacatgtatcccctcgttcagcatgtctatgcagtagaggagttttaaatggcttcctgtgtcctttttgaattcggcaaaggctttgctggtcgacgcttcgttgtagtacgctgtgtatatgtgtggctttttgtccaccttgctaaaccagtcacctgcctgcgccttcatctcatccatatgctctctgcccgagcagaatactatgtatttgccatcaggctttgtcatctgtctggcaaagacctctgtgaggccgtctgcctgctcgagtgcacgctttagctgctctagaagcttttcgttttccgatacaagtcccgggtttgataagccctcgattcgttttttcagttgttcgagctctttcttgtatgaatacatggctatgacatatttaggctccggaagtatttccctcacgattgcttctccgagtgtcatctctgaggctatgttgccctcaaagagctcctctgccatattgcgctggttgtccagatagcgtatgtttgttgctgagagccccaggcgctttgccttcggatatgcctccagaagctttctcacactcttgccccactctgcggctccacaacggtggaactcatcgagtatgatatagtcagggtgcagggtgtctatgctgtcctcatgcttcatgagcctgctgtatgacatgtattctatgtttgagaactgtgtgtctatgttctcaagctgtgtcttgtagatgtattcacttggcgatagccatagaaagtgtttgtgtggatgctgctccacgagcttgaaggctatcatcgacttgcccgtgcctgtcggatggatgacggctgccatctgcttttcctccagcatggtttcgactgctctgtatgcatcttcgttgtgtttgtaaagatgtatgctcatttgctgcctccgagtgaaacactacattaaaagggaggttggatttcgcagattattacaatctgcgaaaatcacctctgttaaaaaacactagatatataataaaactttagtcattttatgtcaactgctgtatctttttttgtatcttttcacatttttaagggaatattgggatgtattttatatattttttatttttagatggtcaaaattgtggtcagaaataaattaaattatattgacattatatatccgatttgggtataataacaaaaagagtaaccaaattggatatattttttatgggaggtttgttattatgaacattaaggaaatacgaaatactaccggcctttcgcaacgtagtttttcaaagatgttcaatataccaataagtacattgcaaaaatgggagcagggagaaagctcgccaacgccgtatattataaaattgattgccaaccagttaccgatagataatgataatatgtgtaaaattgaagataataacggtaagatttattattataacagagacgctgggtatttaattgattcaataggtacaaaaatcaagataggtgaagatcttgatggtgttaaggaaaaaaatctttcattatatgtggctgatttatttgaatcctattatgaaatagttgataaatttaatcgtgactgtagacttgataaaacagaagatattatatggagttaatatatggcgaagaaaatagctaaagaatactatttaatgcataaagatatacctgtttgcctgatggagctgacagaaggtggaactctcggaaattacagaaaaaatgaagcagctcttgcccactttcctataggtggacagatgaatgatatgaaatttcatgattggtggaaggacagggctattcctaagacgaggcacggagctaagactgccctgcaaagacttggatattcttcaacaaacagtgctttggtagataatttggccttaagtttgtcggattgttattggattaaacctcgtggtgaagatatcgaatggaaagatgtaaatctgtttacaaatgatttcgtagatacatttggtgaaataacactaaacaaggacaatttacttgatttaaggaagaaaacaaaatttaactgcgctgcttcacagggagaacttcagaaaaaatggtgtattgacacttcaggccgcagatatatgattaaaggtaattatggagaatcataccagcaaagtataaacgaactatttgcaacagaacttcatagaaaacaaaaatttgaaaatttcacagtatacactcccacattgttaacagtagaaggtggaattgaaggacttggatgtctttcatatgatttttgctcagaaaatctggaatgtatcagtgcatgggaattattgcaatcagtcaagcttaagcaaaatgaatcatattattatccattgaaaaaggtctgtcttggtttgggaataaaagaagaagagtttgattattttatggattatgaaataatgactgactatctcatttcaaataccgacagacacatgaataatatttctatagtcagaaatcctgacacattagaaatacttggatttgcacctatatatgattccggtaattctatgttctataatattccatacgagcatcttggttcaattcgtattgatgagataaagacacattcttttatttctaaagaagtacggcttttatcatatgtaaaggatagaaatattgtaaatattgataaagcagaaatggattttagtttgtataaaaaagatttaatcgaacgtcatatgcgtatcccaaggctacaagcattatatgaaaagaaactcacaaagctgagagcattccaaaatggtaaagatatatggaaaacagataaatattaagtatttcattcctcttctattgaaataaataatcacaaggaggcatacattatgtcaagaagaggaaccaacatcagaaagagaaccgacggacgctgggaggggcgctactacatagtagacacagccggcagtaaaaagtgcaaatcggtatacggccacagctataaggaagtaacagaaaggctgcttacagcgaaagctgcttcacttaatcaaacagcagctccaaagcagcccgctatcaccgtaaaagcagtcgcggagaaatggcttgaaagcatcgcaacaagccggaagtgctctaccattcaaaagtattctactatatacaacaaatatatcaaaccgaactggggagaaagcgtcatagatgagttaaatcagaatgaaatactcaaggagttgcctgagacagccggtgagagcattacaaagagcatactttgtatattcaattctatccttgcatatggagctgccacatatggcaccggagaaattcatctgtcgtacagggcaaaacgttcatccgtcacatcctcaaacaacataaatacaatcaatacaacagaccagcaaaagctaaccgagtatcttcttaccgagcttgatatctataagctcggtattttattgtgcctttttatggggctgcgtttaggagaaatttgtgccctgaaatgggaagatatcgacatgattagtcgcactctgcatgtcaatcgcacagtgcagagacttccggtagatacggtacacacatccggttcatcacaaaataaccacacagccacgagaaagacttctttatatatagattcaccaaagacttcaaattcacttcgtgagattcctatcccagactttatatatgacaagctgtcagattattataacacttcaataaaaggtgactcttattttctaaagaaaaatcagcctatggatccccgcacttatcagaatagattccatatctatataagagaagcaggtatcgggaatactcactttcatgctctgcgccatacctttgccacaaactgtatcagtagcggcgccgacgctaagagtgtaagtgagattcttggacattccaatgtaaatattacattgaatcgctatgtgcatccaaatctggagaccaagcgctccgcaatcaattctatagttatcccataaatggtcagaaaaatggtcatatttatataaaatgcttattttatacataatggaggttggatttcgcagattgtaataatctgcgaattttttattacattctttctgattaggcattagcaaaaaaacacctccattgcactgcaatagaggtgttttcttgcatctttactcttcaatcatcgaaagacgttccttagcaatcttaatgtcttcatctgacgaattaagcattttttttgctgcagctacagtaccatcatttttgaagaaggtcaccaatgtagaaattcgctcttctcttcgtccttgttcgattccttgttcttttattccttgactgagattacacatagatttcaacaactgccactcaaaatgtgtttaaatattctcaaacacatcgagaaattaaagtccttgcggatacttcttactgcttcattgtgtatgctttggcgattgtaaacaatacgctactcacaagttcttgtacactccacagtcgtaaattcctgcgatagcccgcagtacatacttacgtttgcgttgattatgcaacctcgtaagttaaagcatcttttagattaagagcagcgttaaaatccctatcctcgacatagccacaatcacaacggtatattctgtctgaaagtttcaaatctttcttgatagcaccacagcagtgacatattttggatgacggataccatctgtctacgactcttaattcaataccattttcatcacacttagctttaagcgaagttctaaatttatagaatttttgtgatgtaacggcttttgatagatgtctgttcttcatcatccctgatacattcaagtcttcaatagtgatataagatggcttggttttcactatctcggctattgatttattgatatagtcagtacggatattatctattttatgatgaagtctttgcactttgagcttttgtttttgtatattcttttgagtggactctcctttctttaaattctcatatttacgtgagaggcatctttgttctctgcgcaatttcttttctaatttcttaactcttgctgacttattgatatttttataagttttaccattagaaacaatcgccaggtctttcaaacccaggtcaatacccattccgtcattgctattattagcaatcttagcatcgggaatttctacaagaactgacacataatatttgcctgctttgatagatactgtaccgcttttgattttccatccgtctttagttgttggtatataacctttttctttaatgcgcacccaacctaaagtgggtatgttcaacctatgtctctcacatctacagtctttaggattgttctttacgaaatacatttttacatcagacttgtctttctttttgaaattaggaaacgcactttgatgtttgaaaaatcttgtaaatgcagtacagccatcttcaatagatttttttacagcttttgaatatgcttctttaatccatattttatcaggattattaggaatgtactcattattgagccatacgctgaaactcttgccagtcataaacttttcatctttatcgtgtaaagttttgttgtaactgagatagaaattgtagacgtatctacaagtgccgatagtcttgttaatcttgactttttgctcgactgtcggatttatttccgttttgaagctcttgaacaatttcctcatccctttctatcactttccattttgatattgaactcattctccagcatatcattttttcctcagcacttagttcggcggaaataaagcacccaggaacctatgacatatatattatataataataactccatccaatgcaatagcccaaatgtcattaaaaagagaacgggccggcgaatgggaagttcgccggcccagatttacactaggagcaaagtttatactttgcggagataaaatatatttatagaaaaccaaatatttggtgatctatcattttgttttgtggccattcctgttgtcgcgaccacatgcaaatatttatagaaatgtttaaatatctgcgaataacgaattagtcattatagtttctgcatattgtgcttataccgctgccagcttctttccaagctcctcgcaggcagtctttgcataatcgtcaggtgcatcctgacagataacaccctcgccgcctaccactgtagctccggctgctgtcattcgctctacccagtcgcgcatccactcaccatcgccccatccgtatgaaccgaacagaccgattgtcttgcctgccacgcagccctcaagctctgtgacaaacggctccatctcgccctcctcaagtacctctgcacccattgcagggcatccaagtgcgaatgctgtctctgatttaagctcatctattgaagcactgcttacgaatacgatttctgcttcctttccggcatctgtgacgccctttgccactgcctctgccattgctgctgtattgcctgactgtgaccaataaactatactgattttgctcattttaattcctcctataccgcgatctgctgcggttcttctttatatatttccagtatcagcctcatatctatatcctcggccaatagctgtatgacactttccttcgccttttcaaaatcctcaaacatcttctttttgagtggtacgttgcggtacaccttccagtatcctgaatacaggcagccgcatccgttatgctctataaagcctctcacatcctctatcggatacccaagcaaaagccccatctcatgcggaaactgcttgtgttcgtcattcagatacgcttcgtagtgttttttgaatctaagtaatatcttgccgaatgaaaaatcctcatatcccgctttctttagtatgtccaaagcctctgaattattcagatatgcttctaagaggctcctgcggaataagaggaaggcggttttctcattccttgctgcgagcctgaaatgcgatatcccggaagccctcagaatcactctcatggcactctcatcagcgctgtctatcatgagcatatttgaaattctcgctcctgtaattagtggggcacactggagggcaagctgcatttccacactctttaaatccatgctcatagcaatctgaaatacttcctgacacattttggctcctttcatgttagttatttctaacttaagttaaatatatcttacttgtacctatatgtcaagtgtttttttgccatttttacactttttattctcaattaattgcagcaaaaaacacactaagaatctttaattctcagtgtgctttccttattgccgttcttctttttatacaattcctataaaaccaggcttatgacacctgcactctatacatatttttgcggtcaatcgctccaatctcttcgagcgtattgatcatccgatacaccgtagcagtcccgatagagcggtctatcttcgatgcccggtaataaatctctttgcagcttccgcactcgccctcgaggattacatcaagtaaaataagtctctgctttgtaatcctgcatccgctgtcctttagcttgccaacgattacctctttttgctctattgcttctttcgacatacatcctcctatcgttaccgatgccggcagatgcagcttaagcggcagatgaggtctttccatgaaatgcccatcctgtgcttcattcacaccatgccgtggattaatgacagcccttgcaatggctgcagtccattccacactgcaggctcttgcctgctttctttgatttgattattgtcctgattacaagtgcaactatcactacgagaattgcaattacaatgatatcagccagcatgtcatcatctcctattcactacaaatgctactaaatatactactgcattatttcttttccttgaaaaatcctattattatctttacggcaagccccagcaggcatagaagaactatcactgctatgaggtctgctgtgttaaattccaaattgattctcatttaaacatctattacacgtttgatgccgcaaatgaagcgctctttactgttgccttattagggtcttttctaaacaataagtataatacacctgcaaggagtacaaatgcaactactgtccagaagttgaaggctacctcacctatgcaaagtcccacaatctggtagaacataagtgttacacagtaagctgatacattctggaaaatgattgtaaaccagaagaacttacggttgttaagctcttttgctgttgttgagatagctgcaagacatggtgagtcaaacaggttgaacagcaagaatgatactgctaccattgttgttgggaagaatgctgcaaactgatcatgcatgcttactgcatactcctctacctctccaagtcctgagagcacacccattgttgaaacgataccctcttttgctacaaagcctgagagtgatgatgcaactgcctgccatgtatcgaatccaagtggtgcaaagataactgcgattgcagatccgattactgcgagtaagctgttttctttgtcaacaagtccgaatgcgccattctggatgccgaagcttgaaaggaaccacataactgcacagcagaggaagaggattgttccggccttcttgaggaatgcccatactctctcccatacgtgtaacagcacgccctttactgaagggatatgatactgtggtagctccattacgaatggtgcaggctctcctgcaaatgctcttgtcttctttaaaatgatacagtagatgattgtgaggccgattcctgcaaagtacataagaggtgccatccaccagcagccgtcacccatgataaagcccgcgataagtgcgataaccggaagctttgctccacatgggatatttgttactgtcatcattgtcatacgacggtctttttcgttctcgatagtacgtgttgccatgattccgggtacaccacatcctgatccgatgaggaatgggatgaaggactttcctgaaagaccaaatctacggaagattctgtccatgatgaaggctactcgtgccatgtatccgcagtcctcaaggattgagaggaataagaatacgatagccatctgtggtgcaaatccgataggtgcaccaagacctccgatgataccttcaactacaagtgatacaagccattcagagcagcctgcattttccataaatgtctgtactgccggctgaatccactcaccaaagagtgtgtcgtttgtccagtctgttacaattccaccgagtgatgatactgcaacataatatacagcccacatgatgagtgcgaaaataggcagtgctaaaaatctgtttgtaacaatcttatcaattttgtctgatactgtctcttttccggcgcgtgccttctttacacatgagccgatgattgaagatatgtactgatatctctcgtttgtgatgatactctctgtgtcatcatcgtatttgtcctcgagagctttaatctctgcatctacatttggagcactctttagcacctcagaaatctttgagtcacgctctaaaagcttgattgcaaagaatctcttctggttctctgatactgcaagaccaagcttatcctcgatgcctgcgattgtactctccacatcatctgcgaagtgatgtactcgctgaacggatttacctgactttgcaatctggattgccttctctgcagtctccttgattcctgtcttctttaaagctgaaatctcaacaacctcacagccgagcttctctccaagtgctttgatattgattttgtctccgtttttccttacaatgtccatcatattgacagccataagcaccggaatgccaagctcgataatctgtgttgtcagatacagattacgctcgatatttgttccgtccacgatattgataatcgcatcaggctgctctccgattaagtaatttcttgcaacaacctcctcgagagtatatggagaaagtgagtagatacccggtaaatccaccaggtccacatccttgtgaccgataagctttccctcttttttctcaactgtaacaccaggccagttaccaacatactgattggcacctgttaaggcattgaacagtgttgtttttccgcagttcgggtttcctgcgagagcaatttttactgtcatgttttaatctccttatttttgtttgctcattctgcctatggtttgtatttactaacctataggcaaaaaaatttactctacttctatcatagaggcatcgtccttacgaagtgatagctcatagcctctcactgtcacctctaccggatcgccaagcggtgccaccttgcggataaatatctcaacacccttagtaattcccatatccatgatacgtctcttgactgcgccctggcctgtgagcttgacaaccttgactgtctcgcctactttggcttgctttaatgtcttcatgctgactactccttttttaattttattgttgtttaaaaaatttatataaacgtttgcataatatcatatacaaagtcgtttaaatcttaaattattacagcttatacagcacattgatgcatgtgttgtatgtgttatatatgttatatcagaccatgatcttatttgccatgtccttgccgattgctactctggcgccctttacattgactatcatattgccggctatctctgagatgacagtcacctctgtgcctactacaaagcccagcttctcaaggaaagatctcacctcttcctttccgccgattttcttgattatctgtgcctccccagcaccactcattgataatggcatcatatttacctcttttcacgtcttttcttcacgactttaatgataaaaaacatcatttggtacctcttacggctgttagtatactctaacgtagcttagatgtcaataatattttttagatttttcttacttttttcagttgtggctaatagggtgggtcccaagtgagcaccgtaaaaccggtgcaatacgcccataataacttccatctcaacgtaaagtacgcgcgccccgggcaccgatggcgcacacgtactctcctgcaggcgcatagcgaaacagtttagatactgttagaattatgcccacgaatcgagtaggaggcggtgactaaccgccgtcctctcacagcaccgtacgtaccgttcggtatacggcgctttcaatagttgacgtgcacagactgataggctgtggctaaatcgtaaaagccactgtttatcagtctttctttattcagcgcccaaatcacagctttgttattgctgatataccaatactttctgcgactgtttgctattgttgccgcatagtgttctgggattcccagcttgactagatttttatatttcgttctaggtttcttccactgtttccatatgcacatgcgtattctgtgatagagccatccgttgatatcatctatgttgttcttcatgcttgcaattccgtagtagttaagccatcctcttgcatatactttgattttctcaaggcttggcttgattgactgacatcgcttacgggaagataactccttcagtctggacttaaacttcttccatgacttcggatgaactcggacatatatgccttttccgttccttcccaatgcaaagccaaggaatttaaaatttcggattgcaaacacgctgactgtacggctcttttctcggttgactgtaagtttcagcctctcctcaagatattttgtactgctttccaagagtctctctgatgctcgcttgctctttgcaagaagcacgatgtcatctgcatatcttatgcatggaacacctcttttcaggtattcctggtcgaactcattgaggtagatgtttgccagcaatggtgatagatttccaccttgtggtgagccttcctctgtgtcaatgaccactccgttttccattacaccgcttttcagatagcgctttatcaactgtactacacgttcatcttttacattctttcgtagaagattgatgagaatttcgtgattaagagtatcgaagtactttgacaagtcaaggactacagcgaatgtatagccttgttctgcatactccttaaccttaagtattgcatcttttgcacttctgttcggacgatagccatagctaccatctgcaaacagcggttcatagattggcactaactgttgggttattgcctgttgaagtgtacggtctatcactgttggtatgccaagctttcgcacaccaccatctggtttgggaatttcaactcgtcttactggagacggagtatactttccacgataaatgcggtcagttatctcttgttgatgttcctttagatatggaagagcctcttcaatggtcatgccatcaattcccggcgctcccttgtttgccttaactctcttatacgctctgttaaagttgtctttatacagtatcgtttccaaaagtctcggctgtgcactgtctctttctttccatatccgattgaatgacctggacgctttcacatacccttcatgttccgcattatctctttgcgaacagccattgttttcaatgttttctgccatagacggtcattcctcctttctcggtcatactcaagactcctactgattcggtccttcacctctcggctactatgacctctgctgacttctatgcgttcagcattgctttatgcaatggttacctctttcaaggcataccgcacagacctccctaggtaccacacgtttcttcctctccatccatctgcctcatttatcatgcatgattccgtgtagttattgggctttaacatgggttgctgtcttacccacatgcatgacctcatatgagatttctgttcgtcagaccagagatttgcccgtgagttggtatattcctcacatccagcttccttcagattccatctcacgatggacacccttgccttcggctatatccttcccactaccgggcggattcgggactttaacccgttagaaacgtgcgccgctaggcgcacaacgcagaaacgctcctgcaaggacgcaggagcgaggagaaccgcgccatgaacggcgcgttttgacggtttcgtcaagcatagaaaccctaaaaagcataattcatacagtatcttaactgtaaagcgtagcctgcaggagagtacgtgtgcgacacccagtgcccggggcgcgcgtacctacctcagtcaaaaaagtatattataatattatattacgtaaaaccagctcgaatccgtctccatctcgctggccacaagctcctttcgctctcctgttctgatggaaagctcctggtttttgatgctcacacgagcccccggctcgatagatgaggtaataaatgcattacttccgatgacagcacctcttccgatgacagtctcaccaccaagtatagaagctccggcatagatgatgacattatcctcaatagtaggatgtctcttcacgccctttagcttctgaccgcctctggtagaaagtgctccgatagtcacaccctgatataccttgacattgtcaccgataatagtagtctcaccgaccacgatgcctgttccgtggtctataaagaaattcttgccaatagtggcacccggatgaatatcaataccggtcttgctgtgtgcatgctctgtcatcatacgcgggatgagcggtactccaagcagatgaagctcgtgggctatacggtttgtagtgattgcaagcagtcccggatagcaaaggataatctcattgtaattgtaggctgcagggtctccgtcaaaaaacgcagccacatcagtctccaccaaagccctgatttttggaatccttttaaagaaatcattgctgattttctcagacatattgacaagctcgtgatgtgataagctcctgtatttaggattctgcggcagggcaagcactacctgcttgcgcagattgtacatgatatcctccaaaagaacagcgatctggctgtccaggttgtaatatctgaagctcgtgcccttgaaatagcccggatacattatcttaataagctttgagagcagatcacaaacagcctccttgtctggctgtgaaaatagtgcctgctgatttatgattttgtcatcatgataatcgtcaagtatctgtgatacaagcccttctatcatttctttattattatccatatattcgaagcctccgaatttactatttataatatttttttgcctccatacgctcctcccatgtgcggtttattataccgcctatgaaaagcacatacatgcaaccatataaccataccattataagcgcaatagtggtcattgtgccataaaatgaagaataattattgtatttatccacgtacacagaaaagattcccgaaaaaatcatccatgcagcagccgcaaataccgctcccggcagctggtactttgccctctgcttcttgtttggcagaaacacataaatcacccagaaaaataaaataagcaccggcaggcagattaccagacgataatcgaccacactgcctattatacttccaattatatgatgaacattcgaaaaatacatcttcctgagcatatttccaaacaccatgatacccagtaaaaaaatgagtgccagtgcaaaaacgatactgtaaagcaccgaatatattcgccgcaaaataaaatttctgttttccttcacatggtacatatcatcaagcccaagctgaaacgaaataaaagcctttgagcttaagtacacggctgtaatcatcgtgatagaaagcctgcctgtgccgctggcatacacctcacttgccagatccttcatgatgtcgccaaacgactcaggaataaacgagctcgcccacatcaaaaaatcagcctctgtaagcggtgtccagctcagcagtgaaaagaaaaacaataaaaacgggaaaaacgacagcatcaaaaagaaggctgcctgccctgcgtatgcagaaatagagctctctgaaaaattggtcacaaaatcaaaggctgtcacaatgatatcccatcttctgctgtatttcctcgcactttttccttcgatgttagattctttacaatcaccacctacggccttacgtttctccgttttgatttccggtgttttactatctaaatccggtctactttgctttgtcatctgccttcttctggaatttctcctcaaatactataaaacgctcatgagtaccctcaccaatgagtcctgcctcatcaaaagcctttacagaaaaagtgagtgctctaccatccaccttcacaagctccgactcacaagtcaccttcatgccaaccggtgtagccgaaacatgcttaatatcaagtgcagtaccgacagtaccacttccctcctcaagctcagacgcaacactctcaaaagctgtattttccatcagcgcaatcatagccggagtagcaaacacatccatcgtgccgcttcccatagccttcgctgtcttatccaaagttactgtaatctctttcttacctttaatacctgcctgtaacatatcagtctccttatatctatattataaaataaatcctagcatttttacgccacaatgtccagtgaaaaataagtttataaacttttcacaattccaaaaatacccaattcatgcggttttctgtcgttttgttagcactcactaattttgagtgctaattttctattgacttttccgaattacagacttattatcatattgtgtttatttaacagataaacctttaaatgctatcaaatgattaaataagtctaactgatttgatcatcttttaatgacctacactcgcggaaacaaactagaattgcgggtaacagacagttgttccgaagataaaatatgaactgccacagggttccattaccggacaaggcagcacaaccaaaggcatgccacaaactatccatacaaaatcctgtggctgacttcatattttctctgaggaattattggctgaaacatcgcaacctcacagcccatagccgcggtgtaaaacatttaactaaatctacattcgcggaaataagctaaaattgcgggtaacagacaattgttccgaagataaaatatgaactgccacagggttccattaccggacaaggcggcacaaccaaaatcatgccacaaactatccatacaaaatcctgtggctgacttcatattttctctgaggaattattggctgctacaccgcaacttcacagctcataaccgcggcgtaaatgtaaaataaaaaacaaggagtgtgtaaaaatgacagaaaaacacggcaatctttcaattgacagcgacaacctgttccctattataaagaaatggttatattcagaccacgatatcttctatcgtgagctcatctcaaacggctgcgatgccatcactaagctcaaaaagctcgacatgatgggtgaatattcccttcctgcagactacaagggcaagattcaggtgctcgtaaaccctgacgaaaagacaataaagattatagataacggtcttggtatgacagctgatgaggttgaggaatacataagccgtatagctttttcaggtgctacagacttcatcgagaaatacaaggacaagtcaaatgatgaccagattatcggtcatttcggtctcggcttctactcagcattcatggtagccgacgaggtaacaatcgatactctctcttataaagagggctctacacctgtacactggtcatgtgacggtggcacagagtacaacatggaggatggcgacatggacgacgtcggaacagagattactctctacttaaacgacgactgtctcgagttcgcaaatgagtaccgcgcacgtgaggttatcgagaagtactgttctttcatgcctactgagattcaccttgcaaaggaaaatgctcctgaggagtacgaaacaatagacaaggccgacaaacgtgacactgacactgtcatcgaggaaatccatgaggacgccaagtatgaggaaaaagaaaatgacaagggcgagaaggagcaggtagaggtatctcctgcaaaggatcagctcaaaatcgttaagcgccctgttccgcttaatgatacaaccccactctggaccaagagcccgaatgagtgtaccgacgaggaatacaaggagttttacagaaaggtattcttagactacaaggagcctcttttctggattcacctgaatatggactatcctttcaacttaaagggtatcctctacttccctaagatcaacactgagtacgactcaattgagggaactattaagctttacaacaaccaggtatttatcgcagacaatatcaaggaggtcattcctgagtttttgatgctccttaagggtgttatcgattgtcctgatttaccgcttaacgtatcacgttctgctctccagaatgatggcttcgtaaagaagatttctgagtacatcaccaagaaagtagctgacaagctcatcggtatgtgcaagacagataaggaagcctatgagaaatactgggatgacatcagcccattcatcaagtttggctgcttaaaggacgagaagttctgtgacaagataaacgactatattcttttcaaggacatcaatgacaagtatcagactcttcctgagctgctcgcacctgttgcggaagatgaaaaaacagatgcggaaagtgccgatgcttctgatgatacaaagaaagctgacaatactgatgcaaatgcctctgatgaaaacaaggagcctgagaagaatacagtttactatgtcacagatgtagtacagcaaggtcagtatatcaagctgttcaaggagcagggaatgaacgctgttatccttgaccacaatatcgatacctcattcatcacacagcttgagcagagaaatgaccactacaagttcatgagaatagatgcagacctcacagagtctctcaaggatgaatccggtgcagacctcacagaggcaaccactactctctcagaggtattcaaaaaggctttgaacaacgataagcttactgtaaaggtagaaaaccttaagaacgcagatgtagcatccgtgctcacactctcagagcagggcagacgtatgcaggatatgatgaagatgtacgcagccggaggcatgggtggaatggatccaagcatgtttgccgctgaccagacactcacattaaatgccaacaacgagcttgtaaagtacatcttagacaataaggattctgagcacgttccaatgtttgctgagcagctttacgaccttgcaatgctttctaatcagccgctttcagttgaccagatgactaaatttgtaaagagaagtaatgatatcatgcttcttctcacaaagtaatctaacaaagtaattttactgttaacatcacataaaaaagctgtacactatgcaggtttcatagacctgcatgtgtacagctttttattaattaccggctctcttaaacaaaaagttcacaaacacagccgataccaccccaagcactgctcctgccaggatatccgttgggaaatgcatgaagttgtacatacgtgaaaacgctataagtaccgcaagtacaatcgccggtattcccattcttttgtctataaacataagtgtcactgccgctgttatgccgtttaacgtgtgtcccgaaggaaatgatgagtcaaacggtatctttacaataagactgactgtcttatctatctgacatggtctcaatctgtcgaccatattttttattatcagattgcccactataaagctcaaaagctctgccgaaagcatctgcatgcctccacggcggtatttttttgaaacacaaagcactacacctatcacaatccacaatacgcctgcatttccgatggtggataaaaacgccattagcttgtctaaaaacggtgttctgatgctctgaattgcatataggatgtcaaattcccagtccatattatatgctcctgtctattattaattattatctgcctgttcaattgtcggtctgaaagtatttattgtacacagtaaaaaatgagcttgttttcacatccttttcatcctttatactgattgaatcccacaggtcactgtttaaactaaagcctgctttttttacaaagtgctcgtagtcatcattaaactgctcctgttgtctcttttgcagtatagtgaccttgttctgctctgttttttcccggtccagcttggatatacacttgatgaaatagtagccgtcatctgtgcttatcatatcagatgtctctccatcgccaagctcaaatgctacagcctcaacctcctgtggcagagtgccctttgcagcatacagctctgtctggctatcctcactgctgcctgatgcaactgctgcaaaatcttcctttgacaaaagcttctggctcacagaatctgcgctctccttgctctttacaaagattttctgtatatggataactcttgcatcctcatcactcacctctgtatcaacgcccttcgatagagaattgtacagcttttgcgcaatcgcataatgctcgtatgcgctctcaatatctgataaatcagcctttgtgaatttcttttcagcttcgtttaatgagtcatggtattcctttgcagcctttgacacactactcttctccttgtctgtaagtgtaatcttcttctgctttgcaattgaaaccatgcagtatatgcgcgtcagctcatcaacagtgacatccctgatatatttttccacgttcgacgcatcatctgtctcaagcaggtttacatcatacatagtgccatacagatttttgtaattggctaaatatatgagtgcctccgtcttatcgcacttcatattgtccacggaaaaaactgtatggctgttcgtggtatttatatcaagcactatctccttgccgccaatactgcagccggtgagaagtgtcgctgatgcaagcagcatacacatcgttttcttaaaatacttcatacctgctatccttccacaacaaggaatctgccgtccgcaatggcaaagacctcactctggtccataagctcatcatctgacatgcccgaaatatctgagcctgcctcatcaaagtaatctcttacttcttttatattcttacataccacagccatgcagtcctctaaaaattcctctgcagcctccggagtatcagcgacctcctcactaaaaagctgtgtctgtttctttaaaaatgtgtctaaaacctcgtcatcgtactcgtacatattgtattcctccatgtaaattatctcttttctttggctttatatacagctgttcatacagcaattatgtctgaggtattaatatattgtatatttttgtaccgcctgttagacattatataatagattgctgtgacatgccactattttttatattcacgacagataacaattgtctgctgtaaacggaatgaatatatgagcctctcatccgcctgtatgcttttcccatctgtagaaaaaatccttccaagtgcatcagcatacagttttagctgtgtgctgtatctgtcgataagctctttagcagcatttaccctgtctgtcttataatcaagcagcactattttatcattctccagccagaatacatcaataattccctgaaccaacacaccctcatagtccatcacaaaaggcttctctttatacaaatcgcctctcttatccgcctgtgccatacgcgctgccacatctgatgatataaactgctctataagctttggtctggtcagcctgtacatgtcatctgtgataagccccttttttagcatttcatccatgcttttcttcacaaatgcactgactgccacatggtcttttgtatctatatcacacaggctcttgaaatccagacactccatgacacggtgcactgcagttccgcgcagcgctccctgattcacacctgctgcatttttaagctctttgctttcattagaagcaccgcctgcctcatcatccctcgcaaagtccggcacatacgtctccttctcctccaataggaacttaggacgctctgcctccctctctgtgctgtcatacttttcaaccatagagtcatgcttcagctcagataccgaatatttgctttttttagttatatcagaagcatatgcatactcaaaatcaaattcctctgcgagttctttggcttttgtttcatccgctgcacttatgtgcccaataagctgcgctcttgatatatcgtttgccgccatatccatcgcagttcgtgcagcgaactctgttgcatcgactgtggatatcgtatacttatccgggtacgacagcatggcaggtataatccagtccaggtaacaccctgctccctccctttgtccaaagcttattggctggttcgcatttacattgcctctatacttctcaaaggatttttgggcatttgaaagtccccctgtcaggataatcttttccttcgccctggtgagtgctacatacagcacacgcagctcttctcccagattttcccttttaatgcgactctctatctcatttctgattagtgatggtcgctttgtccttgggctttttgttttttccacaaggccaagcccaagcttttcatgtatcaccaggtctgattttgtgtcctgcgtgttaaagcccttgccaagcccggaaacaaacactacaggaaactcaagacccttgctcttatggattgtcataatgcgcaccacatcgtcattctcgcctgcggtatcggcctctccgtagtctatctcgtatttctgctgtatatctatgtacctgacaaagtgaaacagccccttgtagctggtcttttcataggctgcggccatctcaatcagcatatctatattctgtctgcgccgttttcctgccggcatggccgatgcatacctgtaaaagcctgtttcatcaagcatcatgtacaaaagctcatggattggcgtatcagctacagcacctcttagtctctcaaataccaaagcgaaggctttaagcttctcgtcctcatagccattctcacctgccatggcgctaagtgcagcctgtgcaaagcttacgcccttaaaggcagacctaatctgtgccagctcctcatcatccatgcccacgataggcgaagcaagcactgctgccatcggaatatcctgcagcggattatcgagtatgcgaagcatggacagaatcacctgtatctcatacgatgaaaagtagcctgtattcgactctacatgcgccggaatatcacagtcctttaatactgctgccactgtattgccccaggttgcaacacttctcgaaagtatcactatatccctgtactgcacggctcttagctgccctgtctttttatcagtcaccatgccgttttccatcagactcctgatacggtttgcaatcaaaagcgcctctatctgcaccttatctccatcctcatcctctataatttcagacagatcctcatccttatagtcaacaagcaaaagctcaggacgcatcgtctcctttggatagcttgcaccgggatacagtgccgcatcgtcatcatactgcacattgcccaaatctgctgccatgattttgtagaatatgtcgttagtaaagtctaacacctcattcctgcttctgaaatttttatgcaggtctattctctggtgtgcactgtcatctgatgtatatgtgttgtatttttccataaacagctcagggcgcgccattcgaaacctgtatatgctctgctttacatcgcccaccataaacatgttgccgactccctgatgctctcttgaaatagcggtaagtatatcctcctgcacctggtttgagtcctgatactcgtcaatcatgatttcctcaaaatgttttgaaaactcacgcgctgtctctgtgggctccagtgtctgttcatcaaccagtatgcgaagcgcaaagtgctctatatcagaaaaatcaaatactctttttcttgtctttacagcctccatcgcatcataaaactcgagtgagagccttatcagctccttaacaaatggtctttgacgctccagctgctcatacataagctcaattgacatgccaaagtatttctgctttattccgtctacattcttcttggcagcatcgcgcatgcttttcacgcgctcctttttcttctcgtctccgtcaaatttcctgatgacagcaattctgccaaaggatattttgtttaagaactcctgcatgccgacatagcctgtcacatcagccattccatcaaacaatgctatatcctctgaaagtgtaagcgcatacttttcaagcccgggtgtagctgatgccaggtctttcgccattgtaagctcctgaacagcctcctccaaaagcaccctgctgtaatccactatctccttaatgatttctgagtcctcaagctgtttagctgactttatatcatagagccttatgaggctgttcatccactttctcggccatgatgagctgcccgccttatagtagatatcctccaccatctgcctgacggcagagtcatttctccccttgctgtaggtatctataaggttgataaattcctcgttgtcttctcttgcataattgtcctcaaatacctgtgccaaagcatcctttagcataagcttaagctctgcctggtcaccgattctgaaatcaggatccagattaagctgtgcaaaattattctgcaccacaaacagacaaaacgaatcgattgtagtgataagcgcattgtgaaccagtgtcgactgcctctgcagattctcatcgtccggcttttgctccttcaagctgtctatcgcacggctgacacgctccctcatctcagcagctgcagccttggtaaacgtcaccacaagcatcctgtcgatatccaccggcggattatccacacatattctgtttactatacgctcaacgagtacagctgtctttcctgagcccgctgccgccgatacaagtatatccctgtctcttaaatctataacctttttctgttcactggtccatttaacatccatattatgtctcccgattatggctttatattattatctccatagcatgctttatgctctgccgctgcaatctgtgtacgcattttatcaagtacatcttccttattgtcaccgttaaagcttctttcgctaaagcccggtatccttgaatcatacctgcatatggcctgaaaagcgcaatatgcgcagctgtctattttcttgttcttgataggattcacggcaacatttccatcgtatatttctcttcctatctcgcgaagcttctctcgcgcaaaccttgttatcacatcaaactcttcggcgtttgccacctttgagcctgcagccggtgtctgatccttttttaaggtgacagggattacgtcagagcttttctcaaagtccctgtccatgcctctgtatgccttttcgtccgagttgataagcccgtcaggcttgagcttctttaatatcatctgattgatttcttcctcagacagctcagtgcccggtgtcacatcctttaaatcaattacagggtcgtcaatgtgatagtacagcataccgcccggctccacacttacctgctttagcgcctctttcttttgttccatgacagcgtccatgtacactgcaagctgaagctgcgtgccatagtacagcttcaccaggtcaaaagctgtatttcccgacttgtaatccagtaccttcacaaaaagcctgccctcatccgtatatgtgtcagtcctgtccacgcgtccctttatatcaaccgtcacatcatttgccatatcaaggctctcgtaaaaggaaaactcaaacctctcaggcacaaagctgcctcttcgtatctgggttgtgagtgcccatactgtctgcttaaataccgccttcatatgtgatatcgaatgttggctttccgctgtatcaaatatgccaaagcctgcatactcatcaatcacctcatttattgcttccatcgcaagctcatctctttttgcatctgtcacgctaaaccagtcagtactctccctatcaagcttcttactgtatctttccagtgcttcatggtatatattacccatatcaagggatgtaaagccgctctcctcacgctctgtaagcctcaatccataatttaaaaaatgcgcatatgcacatctggcaaactgctcaaagcgcgtgatactgccctccatgtgtctgccgtatatgcttcttgccacatttcggctgatcggatcctttgaataatgctcaaaccttgcatttatgagcctctccacggaatttttttgagtaaattctttatcgtctacttcattaccgtcccctgcatcactgactgatgcgtcatagagcatcaccgctgctgcaatctcgcaccatctgtcatccacctcatttgacaacagataatccagagcactctgcctgcttgatatatccaaaagctgttctacatcctctgtctcagtcacgacaagctccggaaacatcccctttaatatacctatgaggtacgatggctgggcagcctttttttcactgtcaagcctcgtatagctgatataaagttccctggatggctttgtcatattcagatacagataaaacctctgtataaatgcctgctcccttgccccgggcgcaagctctatatccagctccttaagtgcctctctctcatactgggatataatgcctcctcttcctgccgcctttggaacaatcccatcgtttacgcctgcaaaaaacatgacctttatgttggtcagacgcgttctctcaatatctccgatggtcacagtgtcgtatcccggcggtatgactgctacatctgccgcatccagtcctgcatccagtatctgtgtaaattcctctgcatccatgcattcatcgcccagcaccgccacatatttttcaaagagctgcatgactattttgtatatctgtccgtattcctttgatgcggtctggtcccctgcatcaagcagtgcctgctccttttttgcaagcttatcaggtatatcaagcaaaactatcagcttatatatagcgagcacatagtcctttaccgttgactttttatcggaaaacacctgatataccggctttagcagctccattatatactccctgctttggtttaaaagctcaagttcatagcctgccttatgctttggcagcctgacccactttttgtcccatgcgcttttacctcttactccacaggcgagcacgtagttttcaagtacatctatttcactgtccaatagctcactaaagccgcaccgcaaaaatctgaacaccgcatctgccgagaaattttgtgccgcaatatcgggtattgacctgataaactcaataaacggatggaaaagtatctcctgtgtggcatcgataaagtaaggaatattgtatttgtcaaatatttcacgcacataacctgcatatatattcacatctcctgtgactatagcaatatctcggtaacgcaggttttcgttccttacaagctcattaattcttctggctatctttgtcagctcctgcttcgggtcacgcagacagtctatatgaatgtgctttggtacttttttaaaggagcatcttcgttttctgaaaagctgctgttccataaagcttagctcttcgttttctgcaagccggtagtttttatcaaggataataggttcctcgacttctatgccataaaacgctgccatttcggtgagtgatttcactgtcctttttggcatgtcaaacagctcctgcatgcctctgctcttaaagatatcctcacgacagtctattgtgagcgttacatatattttctttgaaatgacaaagagctttttgatgagctggttctgtataggtgtaaatccagtaaattcatcaaatgcaatgactgaatttctaagaatggcagactcctccgccacattgctaagcacattaagtatttcctctgcagtgatatatttgtccttcataaacttctcaaatgcttcgtatagcacgagcacatccttgagcttatctgagagtgtatccgatagcctgcctgaggcaatatatcttccgagctcctcaggtgatatattgtactgcacaagctccgaaagcagtgactttacctcgcttatatagccgatgcggtttaagtttctgcctattacgccaagcttatccgcctcctgtgccgcaagctttctgagtacaaggttcttacctgtctcctcaagtaccgtgagatttgtgattccaagctcatcaaacactctgtaggctaagcgcttaaagcttagcacatctatattcatgatagctttattctccgacaaatctacaagctgtctctgcgtctgcattgtaaactgctcaggcactattacaagataattgtcccttgggtttgccttggcctctttcactatcctgttaaagagatattttgtttttccgtttcctgaattacctgtgataaactgtaatgacataaaaagactccatgattaactactgtgtaaaatgtatactgtaattatatcatgaagtcccctattattgaattacttattgtgcttaaattcagcttaatagccgctataccttgtgattagtgatggaaaagtctgattcctgtaaagctcattaccataccgtacttattacatgtctcaataacatggtcatctctcacagatccacccggctgtgctacatacttcacgccactcttgtgagcacgctcaatgttgtcaccaaatgggaagaatgcatcagatccaagtgctacatctgtattcttgtcaagccatgctctcttctcctctgctgtaaatacgtccggctttaccttgaagaacttctgccactcgccctctgcaagcacatccatataatcctcaccgatataaaggtcaatagtattgtcgcggtctgcacgtctgataccatccacaaactgaagtccaagcacctgtggggactgacgaagccaccagttgtctgcctttgatcctgcaagtctggtacagtggatacgagactgctggcctgctccgataccgattgcctggccgccctttacatagcatacagagttggactgtgtatactttaatgtaatcatagatattgccagatcaatcttagcctgctctgtgagctccttgttctctgtcacgatatttgagaagaaatcatcatcaatatgaagctcgtttctgccctgctcaaatgtgataccaaatacatcctttctctcgataggtgccggctcatatgacgggtcaatctcgataacacagtaattgccgtttttcttagcttttaaaatctcaagagcctcgtctgtgtagcccggagcaataacaccgtctgacacctctctcttgattacaagtgcagtgctcttgtcacatacatctgaaagtgaaataaaatcaccaaatgatgacattctgtcagctcctcttgccctgatgtatgcatttgcaagtggtgtaaactcaatatccatatcatcaacccagtaaatctttttctccacatctgaaagcggctgtcctactgctgcacctgcaggtgaaacatgcttgaaggatgttgcggctggaagacctgttgccttcttaagctctcttacaagctgccatccgttaaaggcatcaaggaagttgatatatccggctctgccgttaagcacttttataggaagctctccctccttcataaatattctggccggtttctgatttggattacatccgtattttaattcgtattcctgcatttttctgttctcctgtttttatctgcttatcttgtatatttgaccgtttatatagtgttttatttgtttttgtttacgattctgctctcatactcgcctgttgcgatatcaatatatctgacaaaaagtgataccttattgtcctcgttaaggttctcccataccatatcagtaaactcatcgatatctccgtcgatatctacccatgtaggctcaccctcaaagcttggcagtggatttccatcgcccatatatgtatggataaaatgtccctctcctgcaaccggtgctgagtatgcaaatgtatatctgttgcatgcatcaggattgccgttattgctctttaagattgacatagcgtagttgaactcgccattgtcaatatgcatgattcctgaaattctaggtgtatagttaggagcgtcaggctcaaactctcttgtccttaaggcctgctcaaatgtctgctgcttgtccatcagctcatagatagtatctgtctggtcaccgtttgtgacaattgtcttgttgccgagcactcttacaggtgcgtaaatgataagacttggatcctcaagctttgaagggtcaaatgcctgtgttctgatgccctcgccatcctctacaaatactctgttgcggctgttttcgcttctgcccatgataaagtatgctgttacagccttcttaccatcctttgtgcggccgattacgatacctctgccagggtatgttgtgcttgataattcctttgctaatgatactctttccatgtcatcctccatgttttctgataatgtggtctgcatccccaaattactcgggcctgccggaataaaaaagaccgtctgaacacacataataatataaagctctgcaggaaacttatataaatgtgcgcccagacggtcggcaatcaactgttatactccatgtggttatccacttccgtcagtcatataactgtctttatttaagcatgtatttttgtcattgtcaagtaccactttaaaataagcatgtacttataagttattcttataagtacatgcttgtaaacaatgccattatttactaatttttaaagctgtgaataggtgccgggattcttcctccgcggtttacaaatgcatcacaagagaatctgtttaccggcataaccggtgcacttccaaggagtcctccgatttctaccacatcacctacatcctttccgattgcaggaagcagtctgcaggctgttgtcttttggtttatcatgccgatagccatctcgtctgcgataattcctgaaattgtggtggcctttgtatcgcccgggattgcaatcatgtcaagtcccactgagcacacacaggtcatagcctcaagcttttcgagagtgagtgcaccatcgtttacggcatctatcattccctgatcctctgatacaggaataaaggcacctgaaagtccgccaacatatgaggatgccatgataccgccctttttcacctgatcgtttaagagtgcaagtgctgctgttgttcccggagctccggctctctctaagcctatctcacagagaatatcggctacagagtctccgatagccggtgtaggtgcaagtgagaggtctatgattccaaatggcactccaagcttctttgaagcctcctttgccacaagctgtcctactcgtgtaaccttgaaggctgtcttcttgattgtctcacagagcacctcaaaattctcgcctcttaccttttcaagagcagtctttactactccgggtccgctgacacctacattgatgatggcatctgcctctgtcacaccatggaaggctcctgccataaacggattgtcatcaggagcgttgcagaatactacaaacttggcacagcctgatacaggaaggtgctttgtcacctctgctgtctcctttatcatctcgccaatcagctttactgcatccatgttgattccggtttttgtagagccaacatttacagagctgcataccaggtctgtctcaagcattgcctgagggatggatttgattaaaagctcatccgcctttgtcatgccctttgacacaagtgctgaatatccaccgatgaagttgacacctacctctttggcagctctgtcaagtgtctttgctatggtaacaaaatcctctgagctcttgcaggccgcaccgccgacaagggcgataggtgtaactgaaatacgtttgtttacgatagggatacagtagttgttctctatctcttttcctgttgctacaagattctttgcaagtgttgtaatcttgctgtagatattctcatttacctttgcaaggtctgagtctatacagtcgagcaggcttataccgagtgtgattgtacgcacgtcaagattttccttctccaccatgtcattggtctcaattacttcaccaatatttatcattttgctgttctcctttaactgtgtatgacatttttatgctaaactagattcgatgcatcatctcaaagatttcttccttctgacactttattgttacaccaatttcttctccaagtgcatcaagctggtcagaaatctctgcaaatgaagctgtagcatttgccatatccacaatcatcatcatgttgaaatagcctgaaacgatagtctgtgagatatcaagcacgtttacactgccctctgacagatatgtacatacctttgcgatgattcctactgtgtcttttccgacaactgtgatgattactttgttctttgtgttatccataacaacttattctcctgttctcttattctacggctatgcggtctgatgccctgtctctcttagccacatacatagggaaatcacttgccttatatggattgtctcccattgtgacctcaagcctgacggcttcatacgccagcttttcgtagttgttttctttactaaggtgtcccagtattactgagccaaatttatcatgaagaagctcgcataacaactgcccgcttctctcattcgacaaatgtccgctgtcacccatgattctgcgcttgagcggatacggatatgcccctgtctggagcatatttatatcatgattggcttcaagcagcagcccatccaggttctgaagctttgaaaccagtgcatcatcatacgtgccaaggtctgtcacgaccgccatcgcatgattttcgtttttaaatctgtacgcgacaggatcagccgcatcgtgtgatatgtgaagcggctcaaactctatatcgcctattgtaaaatcgacgcctgcctcaacaggatgaaacagctcatcatctatatttccaacggatttggtacattttatggccccgattgtggcctttgttgcataaatcggaatatgatagcgtcttgccatgacaccaagccctgcgatatggtctatatgctcatgcgtcacgagaatcccctgcatatctgtagccgtcatatcaaattcattcagtccgttttctattttcttaccgctgatgcccgcgtctatgagcacatgacaatcatccgtacccacgcatatacagtttccactgctgccgctggcaatgctgcataattctaacatgttaattctctttccagtataattctattttgtctccctcatgaagctcctcagaaaactgggcatctctgccatttattacagtggctattgccctgccctttcctgcctgtaaatcaaatgagatatgggtaaatatatcgacaaatatatatgtatccttgccggacagctctacaggctcaccgtttacaattactgtaactgtattttttgatgagtcttcttcctgtatatcttcctgtatatcattttttggcaattcattttccggcagtttgttttcaggcacagcagatgcttcagcttctttagcaaaatcatcatgcagttcatcgagcacctgattcatcatctgctctgatgttctggccactgtgttgtctgactctgtgctgtttgcatcctgctcagctaagaccgaagcatcatctgaatcagactcttgtgagtcattataagtgttattgtcgattcttgcaacaccatattcatctgttttccactcaacagagaaattttcgtatacaagagtgtcgagacctgcctcttcattgtttacaaatatcatctggtctgtgtcaataacgaggtccataaactgcgcaatctggcgcactgtatagtaatttcttgtctcaatcacatcattttccctgatgctgtaatcctccggctcaagctctccgtttacctggacaaacctaggacatgaaacccttctgccgtttatgataaaagtaatgacagaatgattgtactcatcaagctgcgatatcttatacactgctgcctctcctgctgtggacggctcgatgactatctcactgtttggctcaagcggtgtgttgatgcttgctggctttccgttcatggtcactactgcgccatctccggcctcgcctcttacaagccttgccacaccgtttaccgtaaagtttatcggggtgccgcgctttggaaacagctcatcgtttggaaatcccgcctgaagcgccgcatcgactattgtaagcctgttattgtcatagagctttattctctcaccgttgaatctgaccataataaaattatttctctggtcataataattcagacatataccaattggagtgacaagaagtggatccttcttaatatcctcctgctcaaaggtcacatcgccaagcacttcctcacctcttagagctactctttcctccggcaggtcaagatcttccgcaagcttttccgtgaagccgtgtatcttgcctccacctccgactacaaagcaggcactcactgttttgtcaccgtttagctctctgattttagccgatacctcttgtgcaatattgtcaacaacaggtgccacaacctcccacacatcctctgccggaatcgtgtgctcgatgctcatgatatccttgtatgtaaccgtatcacttgtcgtagactgaagcttgatactctccgccatattgaaatccacgaggaaatgctgcacaataacttctgtcagctcatctcctgcatgcggtatcatgccataggctatgatacttccgtctcttgtgattgagatatcactcgttccggctcccacatcgacaagtgcgatattaagcatacgatagttctccggaattgccacattgatagcggcgataggctccaatgtcatattggctacactaagcccggcctgtcccactgccgcatacagtccgtctaccacatcctccggcagaaatgtaactatgatatcctcgcctattttgtttgccttatgcccctcaaggctgataaacacctcatcattcaaaaagaatttgactgtagaatatcccacacagtaaaacttatagcttgtatcgttaacctccttgagtgcctcctgtgctttttctatgccaagcaggtcaagcgtatggacatcctcgccggtcaccacagactcctgcgcatactcatactccacatgcgtcgtgacagtctttaatactcgtcctgcggctgctatacacacctcttcaagtggctgtcctgtctgtttttcaagctcgtcctttacttccttaatggtttttgccaccctgcctatatcatgtatctgaccgtcaagcatcgctctggtctcatgctccctgacatactgtgctgtaaccacaaattccttgtcatcagtctgatagccgacagttcctacaacatttcttgtaccaatatccaaaccgaatacattattcatttccactactccttgtatttgctaagcgctttatttattgaagctatcgtgttttcgatatctccatcattatcgataacctccttgcagtgccttctgtactcagcttctttaagctggcttgcaaagatactatctatcttctcatctgaatagcctcttgatgacttaagtctttttcttctgacttcttcacttgcataaatataccacagctcgtcgcagatttcaccatatccctcctctataaggagtgctgcttcaagcacaagcataaaaagaccttctttttttgcctctttaactgcattaagcacatattcctttactgcaggatgcactacttcatttagaagctctctttttttatcattcgaaaaaatcactccggcaagtgccggtctgtcaaaatgcccgtcctcaagccatatcggttcgcccgcaaacaattcctttaatctgttgtagcagtcgcttcccggctccatcagctcatgtgctatctcatcggaaagcatgacccttacgccatcaagttccctaagatagctaagcactgccgattttccggcacctacaccacctgttattcctataaaaatcatactatttccttttctgtcatcaatgcgcatcataccagtcatagccacactcggtgcccacctccatagataccttcatgttcaccgcaccacgcatctctttctccagaagcttaatcactttatccttctcagcttcctttgtctcaattaaaagctcatcatgcacctgaaggataagtcttgactttaagccctcgtcaagaagcctgtcatgcacacgtatcatggcaatctttatgatatcggctgctgtaccctgaataggtgagttcatcgcaactctctctccaaactgtctttgcatgaaattgctcgagttcagctcgggaatcggtctgatacgcccaaacatggtctttgtatagccatttttcttggcatccaaaaccgtctgatccaaaaactccttaatctttggatatttgacaaaatagctgtctatatagccctgtgcctctttccttgaaatccccaggtcgttagacagaccaaacgcgctgataccatatacgataccaaaatttacagcctttgcatttcgtctttgaagatctgtgacctcatcaaacggtgtgtcaaacacaagggatgctgtacttctgtggatatcctgaccattcttaaaggcctctatcatcctttcatccccggaaagcgccgcaagcacccgaagctcgatctgcgaatagtctgaatcaacaaacaaatctccctcctcaggcagaaatacctttctgataagcttgcccagctcaatccttatcgggatattctgcagattaggctctgtgcttgaaagacggcctgtcgcagtgattgtctgatttaaggtagtatggattttgccatcggatgcaatatatcccgaaagtccgtcagcatatgtgctctttagctttgtgagctgtctgtattccaatatatccgcgacaatcggatactccggtgccagcttttcaagcacatctgccgcagtagaataaccggtctttgtcttcttttcatttggcagtccaagcttctcaaatagaatgactccaagctgctttggcgaatttatattaaactcttcacctgctgcctcatatattttcttttcaagctcagttatcgaaacagcaagcttgtctccatactcttttagctttattccatcagcccttatgccctcattttccatatcatacagtacgaaaacgagtggcagctctatatctttataaagagtgagcatatccatttcctttagcttctgcaaaagaaccggctttgatttccaggcagtatacacctcgtagcaggcacagtccactgcctttttctcatcctccttcatcatccgggtgaaatcaagctttcccagataatcctttttagatgagagcataagtcccagatagtcctttgcaaccgcatcatagggatactccccgacaagcggattgataaggtatgcagccaccatcatgtcaaaatatctgcctctgtcatctgcctttatctctttgctcttaaatctgtgcagattggtctttaaatccggtgatatccataactttacttccaggttatttagtttttcatccaggaagctgcttgaaatctcatcaccagtacagataaaataaatgtcctcctctgaaaaacaaatcgaaacagcaagataatcgttagaaaccggctccgaaaacagacttagctgtccatcactttcgctgttttccaaagactctccaggtactaccgcaaaagcgacctccttgttctttgccttctcaaacacactctctgcagtctttaagtcccttactaccacaaaatgctcctcggcattgtttttaggagcctccacgttaaaccgtgacagcatgtttttgaattcgtatcgtttacacagtaaaaaggcttcctcagtgtagagtgactctactccgccactaagctttgcatcagaaaattcatagtcaaccggcgcatcaagtatgattgtcgcaagctccttgctcataaccgcctgctcccagtactccactatattctttgaagcctttggcggctttacattctcagcgtcctcatgtactgcctctatacagtgatattttgctataagtgcgcctgctgtcttttcgccgataccgggtaccccgggaatattatcagacgtatctccctgcagagcctttacatcgataaactcctttggagtgacgccgtacttttcgataacatctgctgtattgtagttttctatctcggttcctgttttctttgtctttggaatccttaccatgacatggtcagtcgcaagctgcaaaaggtctctgtctccggaaatgatggcgacatccataccggccttttctgccctgacagataaggttccaagtatatcgtcggcctcatagccctccttttccacgattttaatgcccatagcggtaagcatttcctttatcataggcacctgctgcctgagctcctcgtccataggctttctcgtgcccttgtacgcatcaaacattctgtggcgaaacgtcggcgcatgcacatcaaatgccaccgtcagatagtctggcttttcctcgtcaagaatcttgaacatgatattcaaaaaaccatagactgcatttgtgtgaagcccctctgaattggtcagatcaggcagcccgtaatatgccctgtttaaaatactgtgtccgtctataagtacaagcttttcactcattttgatactttccttactgtcaattataatattgttgtaatcgctgccggtcacactgcagtgcaggcagtaacgttaaatagctcttgtatatttcttaagccactgggcctcctcatcattcaaaaatggtgaaacaagctcataaactctcgcatgataagcattcaggtatcctttttccctgtctgtcatctgatttggatcaatcgcatcgagatctatcggtacataggtcagattctcaaaatacatgaactggccgtactcatttttctcgcccttccggcagataagctcattctctgtacgaataccgaatttgccctctaaatagatgcccggctcatctgtagtgaccatgccctcttctatcacacgctctgcagttctgcccgggtactgcttccagtgaaagctgtttggtccctcatgaacattgagcacatagcccacaccgtgtccggtaccgtgattgtagtccatgccgatctcccacaaaggctctcttgccaaaatatcaaagtttagtcccgagcagccctccttaaaccttgcatttgccaggttcatatttgagcggcaaactctcgtaaacatatccttcatctcgtcagtcacagggcctagtgcaaaggtcctcgtgatatctgtggttccctccagataatgtcctcctgaatcaaccaaaagaagactctcaggcttaagctgcctgtcagactcctctgttgcagaataatgcacaatagcaccatgatcagcatatccgcatattgtggcaaaactcaaatcaagaaagccctcctgctcagctctaagcgatgcaagataatctgaagccgaaatctctgtcataggtatcttacctatatttgtcttaagccagtacatgaacttgcacatcgcaactgcatccttcaaatgtgccttgcgcagattttcaagctgtacttcattctttacggccttcatgacaactgtaggatcctccgcatcaatcaccttaacaccatccggcaggctgtcgcagatgcggtaatttacaatcgatgtatttagaagcactgtctctttttcatcaatatgcttcacatattcataaaaatcatcgtaaggtcttgtctgtataccattcttatcgaggtatgccttaagagtctctgtcacaacctcttcctgcaaaaaccatatgcagctgtcctgtgacagtgccagatatgaaagcactacaggcacatagcttatgtcgcctcccctgacatttaaaagccaggcgatatcgtaaagtgatgacatcagatgaagggttgcacccttttgtgccatctgctctctgactcttttaagctttgagcttatatcctcaccggtgtatttattgtcaaaaatcatgacaggtgcctttgacataggtggtctgtcagtccatatgaggtcaatcagatcctcatttacgtacatgctgccgtgcttttcttttgcgatttcagaaagccttttgccccatgcggcatttaccactctgccgtcaaagcctattacaccgccatccgaaagagtatcctttatatactcatcaactgtcggtacgccctcctcgccaatcttaaacagctttacagtggtatccttaagctgcgcagccgcctgcacaaaatacctgccgtctgtccatagtccggcctcatccatagtgatgactgcggtacctgctgagcccgtgaagcctgtaatatatttgcgtgccttaaaatgctctcctacatactctgactcatgaaaatcagcagtaggtaccacatacagcgagatgcccctctttgccatctcgcttctcaatgcttttaatctatcctgtatcattttattatgcctctttaaattcaaaaaattttgtatctaattccggatacattctctttaatgagattggtttgccggatttgttcaaaaagcaatggctgctttttgcagtggtgcgaagctcgcctgtctctttatccttcatgacatactcaagctccatcttgattccgttatacttaagcagctttgtgtagatgacgaccgtatcatcgaaatgtaccatactgtgatactctaccgatatcgacagcaccggacttatgatttccatctcctccatctgcctgtagttgagtcctatctgatccatcaaatcaagtcttgcttcttccatccacttgacatagtttgaatggtggattatacccatctgatctgtttcataatactttgcgtggtgctcgtaaggacggattctaagttccccttgtgagccggcaatctgtaactcattgtttgccataaaaacttcctccattcatattttggtcttatttctattatgccacattggacagctaaattcaacgacttgaccgtaaaatataaaccggctgctacctgcgtatcatactgtagcagtctctgcatatattgcgtgaatttccaatcggaagtattctgccgcaataccggcatctgataatatactcatccttgctctttgacagaagctgcataatctttgcctgtgttttgtcgcgctcgttttcaagccagtcctcatccacaattttgcccatgcggactgaaaactgatagtacaaatcaagctttttgtaataggattcgtatttcatgagcccctgatactttgaatgcttatcaggcttgtcgagagatatatcagatgtatacgacatgcagtagcgcagccattgtctgacaagctccctgtcctttatatctataggacatgtaatcatcttataaagcagatatttgtcatcaaaatctgcgataaagtatcgctccttatacgcatatccatacaaaaacaatatctcatcgacattgattttcctaaacggtgctgatggctctgcctcatgccagagcttaattatcgcatcaagcggcgcatccattgtaaggagcacctgcgggaagccaagacttactatatcaatatcctgctccggtatatttagcgtattcttcagataattcagattcttttgtcccaaagctgtcacatagcctgtatcatacagaccaaatctgcctgcacggcccgctatctgttttatctcagagatgacaagcggacgtcttgatactccatcaaacttttccacctccagaaatacaattcttctgaccggcagattgagtcccattcctatcgcatctgttgacacgacaacctgtgtctttttctcattaaaaagcgtcatctgcctgcgccttatttccggtggcagacttccgtatatgacacttggctttatgccgttttcctccagacgccctgctatattgagtaccgacttctttgaaaagacgataaaggcatcaccctctcttacatcctgtggaaatgaaaaaggcttatcctccagctttagagctgtctttctctcatactcccttatctcatactcgtcatggcacagattaatcagatgaatgactacatcctttgccaccgggctcatgcatatatgaatctctcctgcaagtgtaccaagaattgccctggtccatgaatgtcccctgtcatcatctgcaaccatctgtgcctcatcaatcactgcgatatcatactccttatcacagtcaagcatctccactgtcgatgctgtaattctgctgtctgatacctcaagacactcctgacctgtaagcatggtgcatggtatgcctgcatcattcatcttctcatatacctcaagtgccagaagtctaagaggtcccagataaactccgttttgcgccagcttaagcctctcaagcgcctgatatgtcttaccgctgttagtcgggcctatatggagtatgaagtgccttttcatgctctgtgcttttggaaactcaagctccggccgtgccggaaccagcgtgacaatctctcttctaagctccttgctgcggtactcattataaagcgccttcatgctccttgtacatatcgcacctatatactccttgcgcaaaagctttagaaaatcctctgtgagatactctgcctcattctcatcaaactgctccatatccaccctgacgagctgcggaaggatttctctatttaaaatctgccttgcattcttattgttggaatagtaggtaatcaatgcaagcctttttatttcctgatgcagtttgtcaagtgccacagtctcattttttgaaaatcgcgcatatttaattgattttgctttactattgagcctgtgaatatagtgtgccagctttacaggcttacctgtacttctcttcgcattctccctgtactggtcaacataaaactgtaccagtatctcttcaaacgatttttccatatatgtgtgttatcctctttatttatatacaccgttaagagtcacctcaaacgtaacatcctttccggcaagttctgtatttaccttataatcatccgggaatttaaggtttaaatcaaaggtttctcccaccttgtgacctaccactccttcctcaaagccatctatatagctgcctgagccgagcaccaggtctgtaccctgtccatcagtgcttccaccctcgaatttttcaccgtccatatatccggtgtagtcaatatttaccttatctccgttttccgcaaccgtgtcagtctctgtattcagtgttgctgcctcggtctgtgaatcactgctttgtgtctcggatgcctgagaatccgtggtctgcgatgcagcttgcgtaccatcagtgccatttgacgatgaaccgcccgatgtcgcaactgcccagattagcactatgactaccacaacgactgccactaccggcacccagaatttcagcagattcacaacctttgccttcttttctgccttctctctctcgattcttcttttttcctgtgcgatttttttgttttgtttgttcattttgttaatctcctgttttatttttattattgaattatactattacaatttgaacattctgtgtttcgcataaatgaacagtatgcgttgtctgtcagtgcattcgctatctgtcactgttcgctttaaactttaaacggctgcgtctcttaactatttgacgcaacaataaaagcagtagaaagacacccacacagcctgcgcttatagctgcacctgccttaagccccggtgtctcataataaagctctatctcatgctctccctcatccagatgaatgctcacaaaggtatctgaaaaatcctcatactctgcatccttcccatccaccttcatagtccatcccttttcactcggaatagaaagcacaagctgtcctgcctgcttcacatcaatgtgtccgcttatgtgtgtatctgaaaaatcatccaccgagagtgtttgctcattgagtgtattgtaagcactctcaactgcagcaatggaaagctcgtatacattaaatcgtacagcatcggcatcagtgtttgtgacggaaactgtctcccccgccttcacatatcccaggtcaaacagatacctgtgagtggtcttcgagtatgtggtctcatactctccgtggctgaatgtcagactgtcagtgctgcacgaatcgtatgctgcataataatatccgtcatggtcaaaggtgagagtcgtagttcccggattttcgtcctgagtgcactctgtcagggtcagcgtatcatctgctgcaccaaggagcctgccaagggaattaatcgaatagattttcgatgacgaggatggcttccactcatcaatcactccctcatccatcataaacccaagcggaagtgtgtagttattccgatacagatagtgatttccgcattttccaacaagtgtagtcagctcattctgtggctgtattgattttgtaaccatatatctgaccgaaagcatggctgacgtgacaggtgtggcaccgttataacagtagaaattcttgcctccctccatataaagagcctgataaaaatggctcacatttatattcatcagggaagaaaactgtgttccagaagcatagccgtatcgtgtgtcatcatttttagttagtcggcctgtatcctcaaccctgtaaaatggtacatcgttgtcagctgcatcctcttttgccagcttaagtgccttttgcatatcgtccacattggcattgtagctgcttctgccggtacatccaagtcctgtcacagccatattgacagccagctccacaatcgcaataccgcatgttataaccatcaaaagctccctgtttttccttgctgcaagctttaaaagtactatcataataccgtacagcgcaacaaacaatatgcttatgataactgcataatactctgtcacatcctcatcggcaaacatcgtgcttactgccataagcgccgatgcaaataccactgccacgccaatatgccacagtcttatgccacgccactttcttactgtagcatagcctatggtcaatacaagaaatgcatacagatacgactgtctgccaggcagcgaatccggaaaatgcagtccgtgccatataaagtcaagctgtttattggcaaagcttgccatgaaaaacaacacaaacaatatgggagctatttttttcttccaattaatccttttattgagcacaaacagtatcaaaagcatcacactaaaggctccggcatacagattcggccagttctctgcaccctcatagacgcttgctgtcgtacacatcctgccgacctccgataagagattaaaataccactctatctgctttgggaactcaatccccgatgaaccgctgtagcttaaaatgataagctccgggataatgagcaccatcgcagtgcctccagccaaaagcgagtaaacggcaaatctcacaattgcagccattttaccgccattttgcgtaaagaaaagccatgcaaaccagaataccaaaaagatgcaaagcatgatgctcagataatagtttgacaatatacaaagtgccagtgatacatagtaaagcaccggctttttgtcccgcacaagcttctcaagtcctactatcgcaagcggtgcaaccgccacaacatccatccacatgacatcccagctatacgcagctacaaagccggaaagcgcatatgccgtagaaaaaacaaatgccggcacaaatgtattattgtgatatctgttatcctttccaagaagcacaaaatgctccttcaaaaaatagaaaaatgtcgctccgctaagcgaaatcttaaaaatgataagcagctcaataaactcaataatatggctctttggaaaaagcaccacaagccagtttaacggactcgccagataataggcaaataccgatacaaaatcactgccaagcccgatattccatgtatacatgaggctcgcaccatttcttagcttctcccacagctcattaaagaaaggcagatactggtgatacaaatccatatgcaaaaggcagtaatcgccaaatggatatacaccatttcctatacagatgattatacatatgaaaaatggaattaaaaacgctgtcaaaagtggatgttttttaacaaaattcatcacttatcctcccagtcaaacagtctgtaatattgcaaaagcttataatcgtttagcatatccgaatcggcctgcttctttttgctgccggttgccttgtctgatttatttgatgctttatctaatgtcttatctgcagttttatcagtgcgtaccgctgatataattggatactcctcctgcagctttagcagaaagctctgatagtcatttgtcggcacacctgccgctttaagtacgtttgcagccagataattaacgctcgtgtcttttcctgccgcctcatcaatatcataatttgcccagataacatacggcacctgataacgcagcttaagttcttcatttgataaattattatagtccatgccgtttgctgcaagaacggagcttgccacagtatcatttggctgatgatcaccgaaaaataccactatagttttctcatccacatttgagaaatattcaatgaggctctttaaatcctcgtctgtcagcttaatcaaagaaagatactggtcaagtgcagaattattgagcttatccgctgtcaccgtattgtcaaagccgtagtaggtatccgtgtatccaccatggttttgcatagtgacattgaatataaatgccggctgaccatccggtttgttctcataggtctcaataatcctgtcaaaggatgtctcatcacttatatatttgcgcacaaacctctgattagaataatcctgcataaacgaaagattgtcaaatcccaaaagaggatagaccgtatcccggttccatccactgccatagtacggatgctgtgcatacgttgcgtagcctatgctttttaaatagcttgcaagggaaggtgtcgtgctctttatatactgctgataaggaatacttcctaccggaagaaaagccatcgtattgcctgtcagaaactcaaactcggtatcggcggtatttccaccgcatacagacgtattcagatatcctgttatagtgttctcattgcccttttcaagactgtgtacaaacggcatatagtctgtatttgtatcaaaatcgccgagcactgacaggtctgaaaatgcctcatccatcacaactataatattcggataatcacttttatctgcttcatctgaattatcatctgtaccggcatagctgtcaagcagctcctttgccttctgtctgctatacccatcaggcttatcaaccgccacaaacttaagatccatcacaaaggttaccgccattccattcacctttgtcatatatgcaggtgtaaatagaaacggatacagataattgtccgtctggaaatcctcatcctgcagggcattcacaaacagacacagcgcaagtattccaagcacagtcggaatcagtctgagcctgaatttccacttaattctgaaatcaacaaaatgcatcagcataataagagctataaatataactgtaacaacaactactcctgcagtcggtgcgaaatcataattggatgcaacacttgtcgccgtaccaattgaaaaaatatcccatggaacaaaaggagtcgagcggaaaagcataacataatgattaatcagtccaaaaaccatggccacaataaaaactgcacgaagtgcccatttcgccctgcccgtaacaaaataaagaatccaggcaatcagctcaaacaaaataatattaaaaaatcccgccataaatctgacttcttcaaaaggattatgttcgtagaactccataagataaaaagccataatcgggaaaatcgagaaaaatataacattgaatataatttcatattttttataaatcttttttatcatcataatgctcctgtttgctatctggtattacagcctatatggcagatttttgggtacctttttgggtacaattttggggcaaatttttcttaaaagtaccctaatttctttaatttttttaaagattataaataaagaaaaaacccgcaaacccttgattttactgaaaatcttggatttacggggttttgcaaatagtgccggcagtgggacttgaacccacacgggcttgcgcccaacagattttgagtctgcatcgtctgccattccgacatgccggcgttttactaacagacaatattctatcacaattattgacttcatgcaactaaaatttgtaatttcaatataatttcaatgcgattgtgactgttcacgcctaacagtgtgaccagcaacgattacagctcatttaaaaatgtcaaagccttgaaatatgtctcagcatacaaccttattcttaccggtgcattttccgacataaagctgtttgtcaacaaaattaatccattccttgtaatcctgccccactttatatttccctgcacctatggtcactgtcatccttccgctgcccttagatgtccagaaggattttgaattaatctccacacgaagctcatcgagaaaattcttaggcacctctccgtcgacacatttgccaagaagtaaaaactcttctcctccccatctgcaatagctaagctcaacacctcgagccttgtttacgatagtacgagcgagcatcttaagtgcatcatctcctacattatgtccgaatgaatcgttaattttcttaaaatcatcaatatcaatcattgcaaggaaatattccccctgcttctcagcctcaaaaagattcttaagcttcgccatcatatagaaacgatttggaagctccgtcagcgcatcaaactgtgcctgcttttccattgccccctcctcggaagacataaaatgcaaaaggcacatcatacatgttattatcaagaaaactacaccagaaatcatagcaatagaaatactcttaattacaacagaatccaacttatataaaggtgtgtaaaagccatctagcatataaagaataatcagagcaatagcatatacacagcaaagcagaatggcaacatgattcttttttttcttcctgaggaccacataatccatggaaaaaagaaaaaacattgcatcgatcaaaaaaagctggaaattacattgaattccgagacaaaccaccgcaagtatcatataaagcaatatctcaacagccacactataaacatatatgctcagtttttcagattttgtcagactgaatgcaaggaaataaaagcatatgctgatcagactgactcctgccatcaaatctacacctaatgatgaaaacataaatagcatcagcaaatggatgacaagaaatattttgtttacattaaatagaaagctctgctccttagcagtactatcattgctactcattgtccaataccttcataaaaaatatctaatatattactatagaataataacacattttggccaatataacaatatattattgttcaaaagtactagactattttgctactttttttctaattatatatccaataagaataataacagcacttgttatgacacttccataaaatgtcattcccctgcacaaaagctccatattcgctgcatttctaccaacaagctgtttaaatccatcaatcataatataatcagccacgcccatagcaccgggtataggcacacaattggagcccatcgccacaaaacactgtatcacactcacatcaactgccttatttacgccttcgccgactgccataaaaatcataaacgataccaaaagctgtgaaactctctgcattatattccaaaagaaaatctcgatgagaagcccagtctgccctgtgatactgtttgaacactcctgatattctttcatagtatttttaagctttattcgaagcctgtcaccatgccgtattatatgtattttttcaaaaagccggataagactatcacaaattgagtatagtatacttcccttccttagcagcatataaaatacaagagccagaaaaatcagcaccacaatccccaaacatataaatatccgcgaaatacctgagaaatttttcagcaatggatacttaaaaatcatacatagtaagccaattgttaaaagtgaaagtgtatacataacaagattaatcagcagggccactgtagcagcatagcccggtatgccatcccttatcatgaaatacgcactggctggctgtcctcccgatgccgatggtgtaatagccgaaaaatacacatcagctccaccatacacagtaccatcaatcgcgctggttttatacccaaagtgtcttgccatgcgtaccagagcaaagccttcaaaccaaataaacccaaacgtacaaacaaaactcataaaaagccagcctttatttgcatttatgataaaactcataagaatttcaaacgaaaaatgcttgctctgtgagacaacggtccatatgcttaagatagctataaaaacagaagctatcgcccaaaatatcttttttctgtccattaaatctaatccccttaaaaaaaactggtaaagtgaattatgaaaatacaccataccagtttattgtagagaatatatataactttatcaagtaaaatattattaatatctttttaaagtttgttactcaaacttcgcacattaaaatgtgcctatgcaccttgaaaattcaataataactggcataaaaatagcatgaaaccaatggttttgatataattgagttgccaaaaacaattacaaaccggaggctcatgctatggataaaagtataacacaagcgactcaaaatgataagcaaatttctaaatctatcaaacgatttttcacaaggtttcatatttcctcagccttgaaagctgccaatgcctataaaaggaaaggcactccggtaacggagatttttcaatacatgtttctgctgattttctccaacagaagtatgtatatgagtctgcttacaggaaaaaatactcctgattttgcaaaagataccgtgtatcgtttcatgaagatggttcaaattaactggatgcgttttactacaatccttgcatccagaatcataaacaacgctattcttccactggattcggaagaccgtgccaatgttcttattattgacgattccatgtttgaacgtaaccgttctaaaaaggtagagcttcttgcaaaggtctatgaccacgcaaaacataaatatcgcttcggatttagaatgcttactcttggatggtcagatgggagtacatttttgccggtaaacagcattcttctttctacagaaaacaaaaagaatcgtatcaatgaagcggctgagatagacaaaagaaccgttggttacagacgcagaaagctgtctatggaaaagggaacccatgccatgcttgcacttctggaagctgctaaaaaagctgcaattccggcaaaatatgttctttttgacagctggttttcatctccaagcacctttcatgctgtcaaaagaatggatttagatgtaatcggaatggtgaaaaaatctccaaaaatgttttttcgctacgatggtgaagatatgtctttaatctccatttacaacaaaaataaaaagagacgaggcaaatcaaaatatctgctttctgttatggttgatgtagtgaaggatggggacatcattcctgccaaagtagtttatgttcgcaatcgcaacaaacgcaaggaatatctctgtctcatttccacagatgtaaatctggatgaaaatgaaatcatccggatttatggaaaacgctgggatatagaggtatttttcaaggtatgcaaaagctaccttaacttgagcagagaatgtaattctctgtcctatgatgcaatgactgcgcataccgcagttgttttcacccgatatatgatgctgtcactggaaagccgggaatccaatgataaccggtcacttggggagctctttttatacttttctgacgaaatgtctgatatcacatggatacaggcttttcaaatgctgctccaaatgttcagaacaatgctttcagataacactgaactttcagacgaaaaaatcgatgaattggcgaatgtatttatggatgcacttcctgcattgttgaaaacaaaactccaagctgcttaaggtctgaacattgacaactgaataactgccaggtattgaattttcaaggtgcatagctaaaatctacgtgcgaagtttgagtttgttaaattatttactgttacaataacaaatcagtctaaatacaaattaacttctatgattcctcttcctcatcattgtcagtgttcatcatatacacacccctgcttgcatctccatcaggattctttccaaactcgtaatcatttcccggcagaatagcatttaagaaaatccctgcgatagctgcaattgccaaagctgtcagtgtaattgatgttcctgctacagtaaatgtcagtccatttccaaagccaagaccacatacaaaaataacacctgcaataatcaaatttcttgatttagtcagatctaccttgttttcaacaacatttctaactcctattgctgaaatcattccataaagcataaatgaaactccaccaataatcgctgatggcatagtagatattacagccgaaaactttggaataaacgaaagtgcaatagcaaaaacagccgcaatacggataactctcggatcatataccttagacagctcaagcactccagtattctcaccatatgttgtattagccggtcctccgatagctcctgcgaatgcagttgcaattccatcacctataagtgtcctatgaagacccggatcagcaataaagttctgctctactgtagcagaaatagcagacatgtcgccaatgtgctccatcatagtcgcaatagcgataggcgccataacaagaatggacgtaatatcaaacttcatgaactgaaatttaggtattccgacccacgcagatgatgcaattgatgtaaaatcaagaattgctgaaccatcaggattagtaattccagcagcattcataataaaagccacaacataggaaataattactcccatcagaataggaatgatcttaaataagccctttccccatatattgaaaataattataactccaagtgcaataattgcaagaacccagtttgttgaagcattattgatagctgagccggcaagtgaaagaccaatgcatatgataataggtcctgtcactacaggtggaagaaagcgcattacacgcttaattccaaccagcttaatgataagtgcaagtatgaaataaagcatacctgcaacaaatattccaccacacgcatacgcggccttatcattgacagccatatctgcatacataccactgtcaaggtttgcaacagtataaaagcctcctaaaaaagcaaatgacgaacccaaaaaagccggtaccttaaactttgtacacagatgaaatataagcgtgccaaagcctgcacaaaatagggtaaccgatacagaaagacctctggtaagcggctccccacaagccttctgaaaatatcctgatacaagaataggcacaagaattgttgcgccgaacatagcaaacatatgctgcaaaccaagaataagcatcttggccgttccaagctgtctcgcatcacgaattggctcctgtttcttttgttccataacaacctccttaataaattaatgttttcgataagtaaccgaaaacattatagcagtttttaattattatttcattattttttcattatttttttattattttttacaaaaaaaagacatctcattggatgtcttaaataattcatatttaataagtatgtaccttcaaaacttcatacaaatccgatttgttttctccgttattaacaagattaagccctcgacctattagtaacagtcagctccacatgttgccatgcttccacctctgccctatctaccttgtagtcttcaaggggtcttactcccgaaggagggatatctcatcttgaggggggcttcacgcttagatgccttcagcgtttatcccttccagacttggctactctgccatgccgttggtcgacaacagatacaccagtggtccgtccatcccggtcctctcgtactaaggacagctcctctcaaatatcctccgcccgcgccggatagggaccgaactgtctcacgacgttctgaacccagctcgcgtaccgctttaatgggcgaacagcccaacccttgggacctgctacagccccaggatgcgatgagccgacatcgaggtgccaaaccactccgtcgatgtgaactcttgggagtgataagcctgttatccccagggtagcttttatccgttgagcgatggcaatcccactttataccaccggatcactaagtcctactttcgtacctgctccacccgtcggtgtcgcagtcaagctcccttctgcctttgcactcttcaaatggtttccaaccattctgagggaacctttgagcgcctccgataccctttcggaggcgaccgccccagtcaaactccccgcctgacattgtcccattgccagttcatggcaactggttagaaacccagtactacaggggtggtatcccaacagcgactccggacagactggcgtccatccttcttcgtctcccacctatcctgtacatgcagtaccgaatcccagtatcaaactggagtaaagctccatggggtctttccgtcctggcgcgggtaaccagcatcttcactggtacttcaatttcaccggatgcattgtcgagacagtgctcaaatcattacgcctttcgtgcgggtcggaacttacccgacaaggaatttcgctaccttaggaccgttatagttacggccgccgtttactggggcttaaattcaaagcttcgcttacgctaacctctcctcttaaccttccagcaccgggcaggcgtcagcccatatacttcacctttcggtttcgcatagacctgtgtttttgctaaacagttgcttgagcctattctctgcggcctgctctcgcaggcaccccttctcccgaagttacggggtcattttgccgaattccttaacaatgcttcttccgccagccttaggattctctcctcatccacctgtgtcggtttacggtacgggcacgcattacacaatagcagcttttctcggcacatggctcacacgctttgctactttatttcgctccacatcacgtcttcggattatacaacggatttgcctgttgtacacctaccccgcttgtaccggtctttccattcccggcccgtgctttccacatgcgtccctacagttctgataatgcgtggtacaggaatctaaacctgttatccatcgcttacgtcttgcgacctgtgcttaggccccgacttacccagagcagatcagctttactctggaaaccttagatattcggccgaaaggattcccacctttctctcgctactcattccggcattctctcttcttatccctccactgctcctttcggtacagcttcgtcggttttaagaatgctcctctaccactcgcattgcgagtccacggcttcggtgtcgtgtttcagccccggacattttcggcgcaggaactctcgactagtgagctgttacgcactctttgaatgtatggctgcttctgagccaacatcctagttgtcttcgaattcccacatccttttccacttaacacgcactttgggaccttagccggtggtctgggctctttcccttttgactgcccaacttatctcgtgcagtctgactcccgatcatcatctacatggcattcggagtttgatattctttggtaagctttgacgcccccgcggaaattcagtgctctacctccataagactaaatcgaggctagccctaaagctatttcgaggagaaccagctatctccgggttcgattggaatttctcccctatccacacctcatgcccacccttttcaacggatgtggcttcggtcctccattgtcttttacgacaacttcaacctggacatggatagatcacccggtttcgggtctgcgtatactgacttaacgccctgttaagacttggtatcccttcggctccgcaccttaagtgcttaaccttgccagtatccgcaactcgccggaccgttctacaaaaagtacgcggttgttcatttaaagaacttccacagcttgtaaacacagggtttcaggttctctttcactcccctcccggggtccttttcacctttccttcacagtactatgcgctatcggtcactaagtagtatttaggcttacggggtggtccccgctcattccatcaaggtttctcgtgtctcgatgtactctggatcccgctcagtcagttctcctttcgcttacggggctttcaccctctccggcaggctttcccaaacctttctgctagaatcactgaatcttaaatgcggtccgaaccccggagtgcacgcactccggtttggcctctttcgctttcgctcgccgctactaacaaaatcgatgtttctttctcttcctccggctacttagatgtttcagttcaccgggttcccctccatacgttatggattggcgtatggatgatacgagttcttcgtaccgggtttccccattcagacatctgcggatcaaggattatttgcatctccccgcagcttttcgcagcttatcacgtctttcttcggctcttagtgccaaggcatccaccctgcgctcttctttgcttaatctcttcgatgcatagcgttgcatcattaataacttaaagaactttgttgttgttcacaacttggttttgtttctcggatgtcttgattgttagatattcttaagaatagaatatttattcatcaaatcatttgtatgaagttttcaaggtacactgctgtgattaccagttttagttctcacagactttttgactgttttatcagtcattagaaatcttaatctcttaaaatctctaatcactggtaaaaccagctatctaaacagcacttccctgctgatgtaggttagctctttcgagcctgttctattttgaaagcatatatgctatgctgttctttataaatccggcagccacctaccttcccataccgttaccagtatagtattatcggccgcttcagtcttaaccatcgtgttcgggatgtggacgggtgtttcccaaaagcgcatcgccaccggaaatattctgttatctattgataactcaacagtgaaaaactctctactcgatttccttagaaaggaggtgatccagccgcaccttccgatacggctaccttgttacgacttcaccccagttatcgagcctgccttcgacagctccttccttacggttaggtcactggcttcgggcattcccaactcccatggtgtgacgggcggtgtgtacaagacccgggaacgtattcaccgcagcattctgatctgcgattactagcgattccagcttcgtgtagtcgggttgcagactacagtccgaactgagacgttatttttgagatttgctcggcttcacagctttgcttccctttgtttacgccattgtagcacgtgtgtagcccaagtcataaggggcatgatgatttgacgtcatccccgccttcctccaggttatccctggcagtctctctagagtgcccggccggaccgctggctactaaagataagggttgcgctcgttgcgggacttaacccaacatctcacgacacgagctgacgacaaccatgcaccacctgtcactcctgctccgaagagaagatacggttaagtaccggtcagaaggatgtcaagacttggtaaggttcttcgcgttgcttcgaattaaaccacatgctccaccgcttgtgcgggtccccgtcaattcctttgagtttcattcttgcgaacgtactccccaggtggaatacttactgcgtttgcgacggcaccgagaagcaatgcttcccaacacctagtattcatcgtttacggcgtggactaccagggtatctaatcctgtttgctccccacgctttcgagcctcagcgtcagttatcgtccagtaagccgccttcgccactggtgttcctcctaatatctacgcatttcaccgctacactaggaattccgcttacccctccgacactctagtacgacagtttccaatgcagtaccggggttgagccccgggctttcacatcagacttgccgcaccgcctgcgctccctttacacccagtaaatccggataacgcttgcaccatacgtattaccgcggctgctggcacgtatttagccggtgcttcttagtcaggtaccgtcattatcttccctgctgatagagctttacataccgaaatacttcttcgctcacgcggcgtcgctgcatcaggctttcgcccattgtgcaatattccccactgctgcctcccgtaggagtttgggccgtgtctcagtcccaatgtggccggtcaccctctcaggtcggctatggatcgtcgccttggtgggccgttacctcaccaactagctaatccaacgcgggtccatcttataccaccggagtttttcacactgcatcatgcgatgccgtgcgcttatgcggtattagcagccgtttccaactgttatccccctgtacaaggcaggttacccacgcgttactcacccgtccgccactcagtcacaaaataatcagtcccgaaggaaatcaaataaagtgcttcgttcgacttgcatgtgttaagcacgccgccagcgttcatcctgagccaggatcaaactctcatgttaaaaagttgatctcagtcaagttaaacttggctgattcgttcattcagatagaatctgaatttactgttttaaaggtcttcaattttcattgaagcgttctgattgattctcaaaatctttcaaggtttctcactgttcagttatcaatgttctttagttcattgtcttgcaacaacgaatgatatgatatcaaactttcaagtgtttgtcaacaacttttttaagttttttatcaagcagggctacaaggattcgaaccttgaaatgacggagtcagagtccgttgccttaccatttggcgatagccctatatgaagcgcagggggtgggattcgaacccacgcgcccttgcggacaaacggttttcaagaccgcctcgttatgaccacttcgatacccctgcatgagagcgggtgatgggaatcgaacccacgtatccagcttggaaggctggtgttctaccattgaactacacccgcatatttaattgttcacaagtcggggtgacaggattcgaacctgcgacctcctggtcccaaaccaggcgctctagccaagctgagccacaccccgatatgctgttttgccgtttcgtttttgttgcctcaccgaagcgactccgatataatatcaccctattccatacttgtcaacacttttttacatttttttgaaattaatttttcaaatgcgatacatccggcgtttttacaatgttttcgataacctgaaataacagttttactgactccttaaatgatttattaaccgcactttctgctgtaggaaatctgaacggacagctatgtcatggttgccggcggccggaagaccgatcacgtgctcaagtctgtatacaggcatgctcaaaaggacaagaaagaggtgcggttttgcaagaaaaaaggcggttttatcacaaaccgccttttagtggactagacgggagtcgaacccgtgtccgaaatacaattccctgtccttctacgagtgtagtttattatttaacattccctctgccacacgataacaaacaaccttgtggtttcagtagcttcatgatacgcccgatggctcaaagctttgccaacgtcgtttctcacatagtcgaagcctgggtcctaaagtgtgagtgctctaggtcagactgctgccattaggcagcgtatgctaaattatcttcagcgtttaattttaatttggccatttaacgcatcgccatacgactcgcttctccagctgcatgtaccccgtcgaaacctttactagcccatattcaattttttttgcggggtacatgcagctacgctccatgttctccgctccgcttcggtccgcccaaagccaaggtccaccggaccttgtgggccccgtcgaaacctttactagcccatattcattttttgctaaccaagatttctgattttgaaatctctctgtgcctctcgcttttgatccttcttggctatgtctgctctcttatcataaagcttcttacctttggcaagtgctatctctactttgaccagactccccttaaagtatacctccaccggcacaattgtgaaacccttttccttcatctttgatgaaagcttctctatttccttcttgtggagcaaaagctttttaggtctgagtggatccttgttgaagatatttcccttctcatatggtgtgatatgcatgccatacaggataatctcaccgttctcaatacggatgaacgactcctttatgctgccctttcccattcgaagtgacttcacctcagttcctgcaagtgaaataccggcttcgtatttctcaagcaaaaagtaatcgtgatagacctttttgttgttggctattaatttctttggttccttagccatgtcggtatctcctttcctcaaactgctttacaatactaacacatttttttacaattgccaatatctaaaacgcaaattattgtaaaccgctggttcacatttctgtttatttacactatataatatattatgacatctttttcaataaatctatcgcacaacgaccgacaaataacagataatcaaataagtatttttaatatcataaaaaatttcgtcattattgtcatattattccgccggtttaaaatcaattgtacgcataattttgtcagtactgtccacaacaaccttgattttttgtccaagcttgtatctcttattggtggctgaacctgctagctcataggtatcctcgtaaaactcatagaaatcgtctgtcaggtctgtcacgcgcacaagtccctcaactgtatttggaagctccacgaaaaagccccactccgtgacacctgatataactccttcaaagcattcaccaatatgatttgacatgtattcacattttttaagcttgactgtttcacgctctgcctcttctgcacgtcgttcagtctcacttgcctgctttgcaacagcatcgagtatagactcatagtgctccctacggttatcattcatcctgccgcggatattttccttgatgatacggtgtatctgcaaatcaggatatctgcgaattggtgatgtaaagtgacaataataatttgccgccagtccaaaatgtcctgtacatgctgttgtatatcgtgcctgtttcatagagcgcagtgtcagtctgcttatcagggattcttcatctgtgccatccaccttcatcaaaagcttctgaagctcctttgggtgtacctcatcagcaccaatatgaagcgtatagccaaaattattgataaatgtggaaagctttgcaattttttctgagtccggcttgtcatgtgttctgtatacaaaaggtatttcctgccagaaataatcctcagccacagtttcatttgctataagcataaaatcctcaatgagctttgttgccacatttctgtcatacggctttatatctatcggatgaccatcttcatcgagcacgactttagtctccggaaagtcaaagtctatagaacctcgtttcattctctttttgcgtagaattgctgcaagctctgccattttttcaaacataggcacaagctccttatattcttcaatcacagcggcatccttatctgcaagaatcttttttacatttgtgtatgtcatcctgcggtttgtctttatgactgtctctgcaatcttatgatctataacttcaccctttttatttattgtcataatgcatgaaagagccagcctgtcacatccctcattcaaggagcatatgccatttgaaagctctcttggaagcatcggaattactctgtctacaagataaacagatgttcctctcttaagtgcctccacatcaagggcactgtgctcctgcacataattcgacacatctgctatgtgtactccaagtacataattgtcgccatccatgtataaagacacggcatcatcaagatcctttgcatcctctccgtctatcgtgaccatcatccagtcgcgtaaatccatcctgccggccatatccgcaggtgtcacatcctttgccacattctgcacctgatgcatgattttctccgaaaaatccaccggcagatcataagcctttactatagaaagaatatccgtacccgggtcatctatatgtccgattatttcaacaaccttgccctccggctttttgccctttttaccatagcttgtgatttcaaccactaccttatggcccgacatagcaccctttgagcgttcctttggtatgaaaatatctgtgccaaatctggtattgtcaggcactgcaaaaccaaaattatcacttgcctcataggtgcagactacctgcttcatgcctcgctctatgacggaaacaacctttccctccttgcggcgtcctgttgtgacaggtgagattgtaatctcaacagtgtccatgtgcatagcaccatttacatactctgcagggataaaaatatcatcaggctctccctccacagtgacaaagccaaatcccctttgatgcgctgtgaatacgccgactgtctttttaatttccgactttgagtatttgccgcgctttgagagtgttatccttccctctgcctgcaaatccaaaagaatctgttcaagctgtggcctgtcctctttttttactccgagtactatgcaaagttccttgattttcatcggaacatacatgtcatcacacataaagtcatagaccatcttttttcgtgtttcatatttatctatattactcattatctctccttttcgttgccccatctgatttcaaatgcacaggctttaaataaaatttcatcatttggatgttgatgcgataaaaaagactgccgatttctcgacagtctaagtatttaccatattcccatatttaaagcaattgaaataataaagaaaagaacaacacatacaattgttgctttaaccagacgtccttcctttgaacgtcccttgttcttgccccaatatgtatcagcaactccggcgatagtgccaagccctgctgacttgccctcctggaaaagaataactatagtaattactaaactgacgattataaataataccgataaaacaatttttaaagttgccacgataagacctcctaatttcaattctaaataacagaactaatatactacgtttttattgcacagtcaagagttttatactgtatgtaacagattttcacactttatgcaatggcaatcttgctcttgcagtatggacactcctttgtgtcaggctctttttcctctttgcgtccaaacctctctcctgccgcattcatagcctttactatgcaaaatacgatgagtgccatgataaggaaattgactactgcggtaagaaacttttcatcactagtatcctttctttttgctctcttcttttgataatctaaaccatttttaatattatacatttttccattttattttacaagaaaatacattataatataattaaaaaaagaaacaactttatatttaggagatttttatgaagtgcatactgtataaaaaagcacttccactcatattattatcatgccttttgcttggtgcatgcggtaattccaaaaatgacagtgtatctaaggagcctctttcccatacttctaccgaaaagggcacctgggactctgctccaaaggtgcttactccaactgccgacggcacacaaacctatacatgtgatgtagccagtatcgatgcttcaaacagcggcagcggctatatcatagtgaattatcacggttctaatcaaaaggtcaagcttcagataaccgggcctgacagtgtcacgtacacctttgatctgcatggaggaaatgaagtgtttcctctggttgcttcaagtggttcgtatactgtaaccgtgtttgaaaatgttgatgggacacaatatgccaccgtgctgtcgcaggtgatttctgtctccatcaccgatgaattcggaccgtatctgtaccctaaccagtatgtaaatttcactgccgattctctggctgtgaaggaaggcagctcactggcatactactgcagcagcgatactgaggtcgtggaaagtgtatacaattatatcatttcaaacttcaaatacgactatgacaaggctaaaaatgtcaaaagcggctatctgcctgatgtggacaaggtctttaccgaaaataccggtatatgctttgactatgcggcagtcatggccactatgctaaggactcaggctattcccacacgtttagaggtaggatatgccggtgaagaatatcatgcctggatcagtacttatataaaggataagggctggataaacggcatcatcgagtttgatggtacctcatggaacatgctggatccaacatttgcatctaccagtgattcgccaaagaagttcatagcacaaaaaaatgattacattaccaaatacgtctattaggaggacataaatgtctagaaaatccaagattttaagcaatgcagagctttctgccttctgtcagcagatttctcttatcatagcagccgggcttcctacatactatggtgtttccgtattatgtgatgaagcacctgataagcagacacgtgatctgcttgagcagatatataagccaatggagcttggtgcaacgcttcacagtgcgcttaaagatacaggatactttccaaaatatatgattaatatgatacagctgggtgaagaaaccggccgtcttgaagaggtcttaaactcactctcaaagtactatgaccgcgaagacgaaatagcttcaggcattaaaagtgccgttgcctatcctctcgtgctttctgccgtgatgattgccgttattgtcgtaatgattgccaaggttttacctgtattctcacagatatatgcagagcttggaagtgagcttaccggcaccgctgccgtgctcatgaagctcagtgaatacatcaacagatatctgcttatcattatagctgtcatgctctttgtcgcactggttctttttatattttttaaaacacgcttcggaaaaaagttccttatgaaaactgctctttccatgtcaatcgcatccagccgctttgcaaactgcatgtttttagcactctcaagcgggctcgacacagaccgtggtcttgatctggcacaggctcttgtaaacaatcctgtccttgattctaaaataaatgactgccgtaaaaatatatctaacggcgagacattttcggaggcactgctgcactccaatattttttcaaagatgtactcaagctggattgcaatcggcagcaaaaccgggtctatggacgaggtcatgcagcatatatgtacatcctgtgaggacgacacagatgcaaggctgtcacgattcatatcagtgattgaacctgccatggttatcctgctttgtatattcattggcttcatactagtatcatttttactcccactgcttggaattatatcaagcataggatagcttacggaggcacagtatgctgttttttgttcagaaaaagaaatcaaccatatggaaattcataccaattgtgcttttagccgcatgtactgttttgtttggtgctttctcttcaaagctgtcagatgacaataccaaaagaagcaagagcacgctggaacgcgccctcacacgaagtatcacacagtgctatgctcttgagggaacataccctccggacataaattatctaacagaccactatggtctcacatacaacagcgactattattacatagactatcaatacatcggctccaatctgcgtcccgatgtgacaataatagagaggaaataacccatgttcaagctaaaatcaagatcacatcaggctgacagtttttttgtgatgctgctgttttttctttttgcgctgactgcttttatcctcgtgctgattggcgtaaagcaatacaagtccactgccaatgccatgaattacaactacgaggtacgcactgtcacatcttatctgcgcgaaaaagtcagacagaatgattctgacgctgcaatcagtgtagaaacaataaatggcacaaaggctctatgtctgaaaaacacaataaatgacatcgtgtataatactttcatatactattatggcggttctctaagagagctctatgtacaggatggttcatcatacagtctggacagcggacaaaggattgtcgaaatcgggggacttgacatgacagaaaccaccgacaaaatgattaccgtaactatcaccgatacatccggtggcactaccgatatctactgctccgtcaattccgactaaccatcgtcggacaataaatgcagcaatatcacgtacaccgctccctgatatgccactcgatgccacacaaacttacatacaacaaggaataaaccatgatttcaacaaagcttaaacaatcgaaaaacagaatattcctgcttgagattaccattaatctgctgcttttttcagctcttttgattgtgggactgcttttcttcataaagacccacaagctgacagaagaaactcaggtgctgcatgaggctgttaatgcatgcagcaatgcagcaagcgcatacgaacaggagcatggcgatttaaacgccgtatcatcgctctttaacggctccatctatgcagatgaaaagctattcatttatcttgacaaaagctatcatccatgtgataaggatgatgccgcatacaaggttattgtaagcaggcttgggcaggatgcctacggagtacaaaaggctgacatagagtttatagcagcagacagccactgtgtatacagcattaccgcgtgcagctatactgcactttcctctgatggaaggacggtgagcaccccatgaaaaaaagaagagaattttcaaatttcggtttttcgaccatcctgcttaccttttccatgatatgcattgtcacgttctcggcactcgcctttgtcacagcaaactccgactataagctgagcaaacgcgttgctgataacaacagctcgtattaccgtgcatgtgaaaaggcatgggatgagatatcacagattgatgccattcttgcatccgcctacgagggcagtcctgataaagcagcatactatgaggccataaagactgctctatcagacaacgatactgccataaataaaaacctcgctgaaaatgaatcaaacggcaaggttaccggtctgacctataccatcacctgtactgtaagcgatacgcagactctcactgtaaagcttgatatcaactatcctgtccacaggcaggatgctttttataaaataaaacaatggaagctcaataccgacacagctttcgaggaaaatgatacactaaatttaattggaggaaactaaaatggatgttaaaaagatattaaaagaagcgactgacaacggagcatcggatattttcatagtggccggccgccctctcacatacaaatcaaagggagtgatggagtgcctcaatgaaatcagaatgattccaaaagaaacctttgaatttgtcacatcaatctatgctcttgccgagagagatatttcaaaatttgaggaaaccggagatgatgacttttccttcgctataccgggagtatcacgttacagagtgagcactttcaagcagcgtggctcttactctgctgtcatccgtgttatctcattcacactgccaaagccaagcgatttacatataccggactctgttatggagcttgcggaaacaaacaacggcatggtgctggttaccggcccagccggaagcggtaaatctaccacactagcatgtattattgatcagatcaaccatgagaaggaagagcatattatcactcttgaggatccgcttgagtttttacatcgtcatgacaaatgtattgtgtcacagcgtgaaatcaacacagatacagaaagctatctcactgcacttcgcgccgcactccgccagagtcctgacgtcatattgcttggagagatgcgagactatgagaccatcaatacagctgtcacagcggctgaaaccggtcacctcatattttcatcactccacacaattggtgccgcaaataccattgaccgaataatcgatgcgtttcctgcttcccagcagcaccagatagccatccagcttgcatctgtgctgcaggctgttgtctgccagaagcttttacctgccacaaacggtgagatggttcctgcttttgaaatcatggtactcacgcctgcaataaggaacttaatccgtgaaggcaaggtccatcagattgacggtatcatctacacctctgcagctgagaatatgattgcaatggatacaagcatcttcaatctgtacaaggccggtgtaatcagcaagcatgtggcaatcagcgaggctaccaatcctgagatgatgtcaaagagaattaatttaaactaacttcatacttgacggatatataaaaccccggcatataaaccatgaaacaggtttatatgccggggctttttatttagataaatatgttaacacaagcaaattaccgttatatatactttcgatattatacgttaatctctgcctttactccactctcatccttatgtgcttcaagcaccggattaactacatcacgcagatatacttctacctgacgaggcgcacgtcccacataaagctcaggcttaaggttcttttcgatatcagcctttgtcagtccaaatgcagggtctgcagcgattaagtctacgaggttattttcttttccctcttccttgactgtctttccggcctgcattgagagctgtctgatcttctcatggagctcctgacgatttccgccgttctttacagcatccatcatgatgttctctgttgccatgaatggtatctctgccataaagtgcttttcaataacctttggatatactaccaatccatccaccacattgaggcagaggtcaaggattccgtctattgcaaggaagccctcaggtattgaaagacgcttgtttgcagaatcgtcaagtgttctctcaaaccactgagtagctgaagtaattgcaggattcattacatctgcaagaacatatcttgaaagagatgctattctctcacttctcataggatttctcttgtatgccatggctgatgaacctatctgattcttctcaaacggctcctctacttccttaagatgctggagcagtctgatatcgtttgacatctttgtagctgatgcagcaatgcctgcgagcacatttaccactcttgtatctaccttacgggaatatgtctggcctgacaccggataacaatccttaaagcccatcttctttgcaatcatcggatctatcttgtctattgtctcattgtctccgtcgaagagctcaaggaagctggcctgtgttcctgtagtaccctttgagccaaggagctttaatgtgccctgcacatactctaaatcctcgagatccagcataaactcattcagccacagtgtggcacgctttccaactgttgtcggctgtgccggctggaaatgtgtaaatgcaagagttggctgattcttatacttatcagcaaaatttgcaagctctgcaataacacttataagctttttgtgaacaagctttaatgcttcattcatgatgatgatatctgtattgtcacctacatagcatgaggttgctccaagatgtataattcctgctgccttagggcactgctgtccatatgcatagacatggctcattacatcgtgacgcacaagcttctcacgctcctttgccacatcataattgatgtcatccacatgtgcctttaattcatcaatctgttcctgtgtgataaccggcttgccatcctgtgaaagcccaagctccatctcagtctctgcaagagcaatccagagctttctccaagtggtaaatttcatatcctgcgaaaaaatatactgcatctctttgctggcatagcgctcagaaagaggacttgtgtatctgtctgtactcatattctctcctttattagcgattaagcatttttctctcgaggtctatttctttatcaaaatactcgcctctgatatcatccttcggtggctccatcggatattttcctgtgaaacagcccatgcagattggcaatccctctaccatctcatgaagtctgtcaattccaaggtagcctaaagaatctgcacctataatctgtctgatatcctcaatagtcctgttgtaagcgataagctgctctcttgcaggaatatctgtaccgaaatagcaaggccataagaatggcggtgaactgatgcgcacatgtacctctgtggcacccgcctctcttaacatacgcactattctgtctgaggttgttcctcgcacaattgaatcatcaatcataacaactctcttgcccttaacagcctcctttaatacattgagctttatctgcacgcttgattcacggcttgactgcttaggcttgataaatgtcctgccgacataaccgttcttgacaaatgctgtgccatatggaatgcccgactcaagtgaataaccaagagcagcggcatttcctgactccggtactcctgtcacgatatcagcctcaaccggtgaatccattgcaaggaatctgccagccttgatacggctgctatacacgcttactccgtcaatatggctgtcaggtcttgcgaaataaatgtattcaaacacgcatctggcctgtttttcaggggcaagtgccatagtcatatcagactcaatgcccttttcaggagtgatggtgataacctctcccggctctatatccctgacaaactctgcaccgattgtatcaagtgcacaggtctcggatgtaacgatatatgcattgtctctttttccgatgcaaagaggcttaaaaccaaatgggtctctggctgcaataagctttctcgggctctcaaccacaagtgcataggctcccttaagcttctggcaggcacgtctgaccgcctcctccgctgtttttgagttaagacgctctctggcgatatgataagctataacctcagagtcgattgtggtctggaaaattgctcctgtatactcaagctccttgcgaagctcctttgcgttaatgaggtttccgttgtgtgccatggcaagtgtgcccttgacataatttaatacgagaggctgtgcattctcacgtgttgatgagcctgctgttgaatagcgcacatgtcccactccgatatcacccttcataggctctaaaatatcaggagtaaatacctcatttacaaggcccatacccttgtgtgtggtcacctttccctttggtccgtgtgtatcactcactgcaataccacagctttcctgtcctctgtgctgaagcgcaaaaaggccataatagatagtggatgcgacatttcctccatcaaaatcatacatgccgaacacaccacactcctcatgaagctcatcaaatacatggttatgctcgtcaatatcagaacacctttttaattttgtaccggtatgactttttgtatctatactagtatttatatactgatttaagttattgtcctggttcataatatctccgtttataattgcgaaatagtaacgcggaataaataatatattagcggctgaatttgcttcctgtaagaagctcaaatgcctctttatatttctctacagtcttcacaacaacctcatcaggtaaaagaaggtcattgtccggatttgccttgagccagtctcttacatactgcttgtcaaatgaaggctgtccctgtccaggcttatatccatcaagtggccagaagcgtgagctgtcaggtgtgagcatctcatcggcaagcactacctcatcctgctcatttaaaccaaactcaaacttggtatctgcgatgatgatgccctttgtaagagcatactctgcacatttcttgtagagagcaattgtataatcgcgaatcttctctgcgtactctctgcccttctcaggataaatcttctctaatacttctactgatttttcgaatgagatattttcatcatgatctccaagatcagccttggtagatggtgtataaataggctcagggagcttatcagactcaacaagtccctccggaagtctgattccgcagactgtaccgttctcctggtagcttgcccagccgcttcctgtgatatatccacgaactatacactcgattggaagcatctcaagcttcttgcagagcatgctgtttccgttgaacctgtcctgaccgaagaactccggcatatcctttgcgtctactgaaatcatatggttaggaacgacatcctttgtgaattcaaaccagaacttagacatctgtgtgaggatggctcccttgtctgtaattttattctttaaaatatggtcaaaagcggaaatacgatctgttgcgaccataataaggctgtccccgttatcatatacttctcttacttttccttctttgaatggtttaaattcctgcatgattgtcctccatcttatgtgtaatttattttacaaatcaaatgctacccttaaattatataccagctcaatttgtaaagtcaacgtatattataagtttttttaaataattttgtactatttataagcaattcttatatttattattatatctttaatatatcaaaacaaaagctccggttcaaaccctttgtctgcgccggagcctatataatacaaattttatttaacgataagtgactttcctgtcatctcttttggctgtggaagtcccataatctcaagcagtgttggagcgatatctgcaagacatccgccctcacgaagcttgtaagaagggtcagcgtttacaagaatgaaaggaacaggattggttgtatgagctgtatgaggttttcctgtctcataatcaatcatcttctctgcgtttccgtggtcagcacagatgaataatactccatccacatccttgattgcctgaactgcatcacctacgagtgaatcaactctctcaacagcctttacagcagccggaatcacacctgtatgtccaaccatgtcagggttagcaaagttgatgataataacatcatacttatctgacttgatagcctcaacaagatccattccaacctcaggagcgctcatctcaggctttaagtcatatgttgcaacatccttaggactatttacaagaagacgtgcctcatcgatattcggctcctctacaccaccattaaagaagaaggttacgtgtgcatacttctctgtctctgcgagacgaagctgtttcttaccatttgctgcaagatactcaccaaatgtattcttgatttcttccttctcaaaagcgataagcttgttaggaattgactcgtcataatccttgaagcatacaaatgttgtcttaaggaatgggcgctcaaagccggtaaacttatcatcgcaaaatgctcttgtcatctcacgagcacggtccggacggaagttgaagaagataacagaatcattgtcctttacaacagataccggtgtgccatcctcgtttgtgataactgtaggaagcacgaactcatctgtaacgtcattcgcgtatgactcctccatagcctttacagggcatgtagcttttacgccttcacccttagtgagtgaatcataagccttctgcacacgatcccagttgttatctctgtccattgcatagtaacgtcctgaaagagatgcaatctttcctacaccgatttccttcatcttggcgagaagctgctcgatatagtccttgcctgatgcaggaggtgtatcacgaccatcaaggaatgcgtgtacatatactctgtcaaaattctctttcttgcaaagctcaagaagtccgtaaagatgctcgatatggctgtgaactccaccatctgaaagaagtccccaaagatgcagatcggagtcattcttcttgcagttttcgattgcagaaattaataccttgttcttgaagaaatcaccatcagcaattgcctttgtgattcttgtaagatcctgatatatgatacggcctgcgccgatattcatatgtcctacctcagagtttcccatctgtccgtcaggaagtccaactgcaagacctgaagctgcgccctttacaaaaggacactctgccatcaatttatccataacaggggtatttgccatagctatggcatttccctctttgtggtcacttaagccgtaaccatcaagtaccattaatactaccggtttcttactcatttatatttcctctattcttcatatgaggcttgcaaaatgctctattacagtgacatatgcaagctcacaaaaaatttcattacataataaatgccactaaatgcagctaagctggtgaatttagtgacatttagttattgtgattgtcaaatcaaatattaaattatgatttaataattacttgtagtttacgatctttccaaaatcagccttgagtgaagcgccaccaactaatccaccgtcgatgtcaggctttgcaaaaagctctgctgcatttcctgcatttacagatccgccgtactggatacgaactgaatctgctgtagcctgatcataaatctcagctacacactcacgaattgcaccgcaaacctcctgagcctggtcagaagtagctgtctttcctgttccgattgcccagattggctcgtaagcaataaccatgtttgcaacatctgatgcagcaacacctgcgagatctgacttaatctgaagtctgatccagtcaagtgtaacaccgctctctctctgctcaagtgtctcaccacagcaaaggattggtgtaagtccagcctcgatagccttctttaccttcttgttgagaagtgcgtcatcctctttgaagtaatctcttctctctgaatgtccgatgataacatacttaacacctgcatcaagaagcatctctgctgagatttctcctgtgtaagcacccttctcctcgaagtacatattctctgctccaacagcaacatttgtaccctttaatgcttctacaacaggtacgatgtcgattgcaggtacacagtaaacaacttcaacatcatctgaaactacgagtggttttaactcttctactaatttaacagcctggcttggagtcatgttcatcttccagttgccggctacaattttctttcttgccattttatatctccttgtatttgtatacaaatattttttgcctgcggcttaatttcattaagttgctttcggcttatttatcatcagcacaagctacgccaggaagctccttgccctcaaggaactcaagggaagcaccgccacctgttgagatgtgactcatcttgtcgccaagtcccatctggttaactgctgcagctgaatctccaccaccgatgattgtgatagcatctgatttagcaagcgcctctgctactgcaagtgtacctgctgcaagtgtcgggttctcaaatacacccattggtccgttccatacaacagtcttagctgatgcaacagcgtcagcgaaaagctcacgtgtcttaggtccgatatcacagccctcacgatctgcaggcatcttgtcataatcatatgtctctgtctctacaggagcatcaattggatttgggaaatccttgattgtaactgcatcaacaggaagaagaatcttctttccaagtttctctgcttttgcaagcatctctttacagtaatcaatctttgtctcatcaagcattgagataccaatctcatagccctgtgctttaaggaatgtgtatgccattccaccaccgatgataagtgtatcagccttctcgaggaggttgtcgataacattgagcttgtcagctactttagctccaccaagaatagctacgaaaggacgtacaggattctctactgccttgccaaggaagtcaatttccttctgcataaggtatccaacaacattctctccacccttagctgtgatgaactttgtaacacctgctacagaagcatgtgctctatgagcagaaccgaaagcgtcacatacatatacatcagcaaggtcagcaagctcttttgcgaatgcatctccggcttcctgtggctttgtctcctctttgcctctgaaacgtgtattctgaagaagaactacatctccctctttcatctctgaaacagcctttgttgcagcctctcctgttacgttgtagtcagctacaaatgtaaccttctgtccaagcttagcctcaagagctgcagctacaggagcaagtgactcaccctcgtttggtccgtttttaacttttccaaggtgtgagcaaaggataacctttccaccgtccttgattaatttctggattgttggaagagctccgttgatacggttctcatctgtgatttttccgtccttaagtggcacgttgaagtcacatctaacgagaactctcttgccttttacgttgatatcatcaattgatttcttgtttaatgacataatatgtcctcccttatttcaaggcataagccatgtggccacgccatattgtgcatattaaaaaatataattaattctacaattcacagatattcaaaagaaatagccatgctttaaaaaagaggcgcggttcaattaagaccgcgccccttgagtagtcttgagatatactgttcttgtgggtacaagaattaagctaactctgagaagtacttgattgtacgaaccatctgagatgtgtagctgttctcgttatcataccaagaaacaacctgtacctcgtacagatcgtcagaaacctggttaaccattgtctgtgttgcatcgaataatgaaccaaatctcattccaacgatatctgaagatacgatctcatcctcgttgtaaccgaatgactcgttagctgctgccttcatagctgcgttgatatcctcttttgtaacgcctgctttcttaacaactgctgtaaggattgttgtagatcctgttggtgtaggaacacgctgtgcagatccgattaactttccgtttaactctgggataacaaggccaattgccttagctgctcctgttgagttaggaacgatattaactgctgctgcacgtgaacgacgaaggtctccctttctctgtggtccgtcaagagtcatctgatctcctgtgtaagcatggattgttaccatgataccagactggattggagcatacttgttaagtgcatctgccattggtgctaagcagtttgttgtacaagaagctgctgagatgattgtatcagaagccttaagtgtctcatggtttgtattgtaaacgattgtaggaaggtcatttcctgctggtgcagagataactaccttacgagctccagcattgatatgagcctgagccttctcttttgatgtatagaatccagagcactcaagtacaacgtcaacctttaactctccccatgggcaattgtttgcatctgggaatgcgtaaattttgatttccttaccacaaactgtgatagaatcatcgcttgcagaaacctcatctgcatgctcgtatttaccctgtgatgaatcatactttaataagtgtgctaacatttttgggcttgttaagtcgttgatagctactacctcgtatccctcagctccaaacatctgtctgaaagcaagacgtccgatacgaccaaatccgttgattgctactcttactgccattttaattcctcctagaattgtaaaaagtatttttagggacatgccctaagatgcttttattatagcgaataattctcaaaggttcaagtactttatttgcgtttgttaaaattttcactaaatattttcatttacacacattttttatcattcttcacaatttttctttttagatattgcactttattataatctcggctacacttaattaattgctgtaattcgcactttccggcagccagcagcagacaattataaatcatgtaacttataaagttttttaacaacaatacatcagttttacggaggtatttatatgtgggatcagcacatgcactgcatgttttcgggtgacagcgatgccgacccggtattgatgataaaatcagcaatcaacaaagggctggacggcatctgctttacagaccatctggactatgactataaagaggagcccgggcttttcgaccttgatatagcagcatatgaaaagcgcattaaaagacttgcaattgttcttaaagaaaagggctgcccggtaaatatccactggggcattgaaatcggtttacagcctcatattacatacaaaaataatgaagtcaccaaaaaatatccgtttgacctcgtgatcggctcaagccatgtagtaaacggcattgacccatactaccctgcattttataaaggcaagacagagcacgaagcctacaccgaatactttgaatccatactcgacaatctgcactccggcgcggattttgatgtgtacggtcacatcgactacgtggtcagatacggtcctgacaaaaataaatactattcatatgaaaagtatgccgacataattgatgctatattaaaggaaattatctcccagggaaaaggcatcgagctcaataccgccggctttaaatacgggcttggccacccaaatccgaccgaagatgtgctaaagcgctatcacgagcttggcggtgaaataatcacagtcggagccgatgcccacaagccggagcatgtcgcgtacgattttgacaaggtttcaaatatcctcaaggatgccgggtttatgtactatacagtatttgaaaaccgcgttcctgctttcatcaaattatagtcctgccttaaagtccttacagttatcattctatctaactattaaacctcacatgcattcgcaaatgtcaaaaataggagccacctgatctacattttacatcaagtggctcctaaagcattggttccgtaagcttcactgtataacctccaagttccgctttcgctatatgaatttattttggcatttccatattgctttgctataaatctgattctgtttatgacaggattcttattcttttagcttagctatggacctctacccttcttcataaaatcactccttttggttacattatctatgtaaactcttatgagagattctatctttcacttttaatctacaagaactttttcaacgatattatttatttgctaatatatctgtgcgattactgctcttcggctcgccctacagatttaaatattccgttcaatcatccttatagtactttgacttaaattatgtaatccccattggactgtacctcctgtgttttatttttgttcctttcgtatctctttttgttgatttaagattacactaatttcacctatttgtcaatatgttttttgataattttcatttttattttaaattgtctgatattttatatattttttgttttgtttacacatttcttgcaattcaatcacatgattaaagggggcaaaatacctttgccccctcatgccgtcatttgtcatttatcatttatcattcttcatcctgtaatcaatacacctgttcaggtaatcgacataatccggattcttgcacatacccttgcctgccacgtcggaaatctttgccacatccatgccattacacttggtggtcttcataactatgttgagtgcttcctcatcagtgtcgttactgataaaggttcctataccgaatgcaacctttgccttatccttgaaataatcatacaatgcagtcgcacgctcgaaatccaggctgtcgctgaacaaaagtgtctttgtccttggattgattcccagactgttgtagtgggctatcatcttgtctccccactcgtacggatctccgctatcatgacgcactcccgaaaaaagtgtcgcataggtgagctgaaaatcacgcaggaagcagtctgttgttatggtgtcagtaagcgcaataccgtttaatataccatactccttaacccatgcatcgagtgcgtaccagtttgaatatgccggattatgcttgtgattgccctgtcctgtacacataatccactcatgagccattgttcccaccggctttaaattgaatttcttcgcaagatatacgtttgatgtaccaataaagtgtgaatctgctggcagctcaacctctgcgattgcctttacagccatctcctgcgcctcagcagacagacggcgtcttagtccaaattcactgaaatcgctaagcctgtaggtatcctcctcgagcagacgcaccttctcatcaagcctgcgcttaaactgcttaagcagcacatcataatcatatgccatacggaagtacacttcatttacaatagcaagcaccggaatctcatacatcgaagtattaagccacgtgccggctgcatcgattgccagcccacacggtgcatctgttgtgatggtaaactcctcatatcttggctgccagagtcttaaaaaatcaacatatgtgccttttatccaggtgatgttatcaagatattcaagctcctcctccgtaaaacgaagctgacagaaggcctgcacctgttcctttatctcctcgaccatctcatctgtaaaatgcacgtctttatttcggcacttgaaggtccatgtcgttttatagcttgtgaactgatggaaaatcgtctgtcccatgctgaatttatacatatcagtctcaagaaggctgtttattatttgtggcaatctcatctgttttatgtcctcttttctttcaaaccatttactaccggtaattttagtcttgattttaccactgcgactatcaaatatcaagcagacacacatgtttaattatcttcaatttattttcttttccgtcaacatattcactggttccaaaataaaaactcccatgaaagccactaaccgtgacctccatggaagcttaattgtttatattgcagagataataacccaataaatatataagatattgtaattattcagttatgaattatttaaaatatttcacaccgctctcgaatatcttcatatcctgctctccgtagatattgattgctacagattcgccacggcgctctgagtgagccatcttgccgaggattcttccgtcaggagatgtgataccctcgatagacatgtatgagccgtttacgttccactcctcatccattgatacatttccgtccagatcaacatactgtgtggcaacctgtccgttttcaaagagcttatcaagccactccttcggtgctacgaaacgtccctcgccatgtgatgccggattgcagtaggtctgaccaagcttagcctgtgcaagccatgggctcttgtttgaaacaacctttgtataaaccatctttgagatatggcggttgattgtattgtatgtgagtgtaggtgactgtgcatcctgctgtctgatctctccatatggtacaagtccaagcttgataagtgcctggaaaccgttacagataccaagtgcaagtccatctctctcattaattagcttttcaacagcctctgtcatctttgcatttctaaatgctgttgcaaagaatttagctgatccctcaggctcatctcctgctgagaatccaccagggaacatgataatctgtgatttgtcaattgcctttacaaactcatcaaccgaatcacggatatcctctgctgtgaggttcttgaatacctttacgattgtgtcagcgcctgctctttcaaatgccttagcactatcgtactcacagtttgttccagggaataccggaataaatactgtaggcttagccactttattcttgcatacatagatattctttgcatcgtaaagaccgctatttaccttgcttgtatcgtctgttgcctttgtatggaaaactccctcgagctttgctgtccataccttgacagcctcctcaacaggaagcaccatatcgtcacactcgatagtctgcttatcgtttacatagccgactacagaggctgcatctgaaatacctactgcatcaattacctctctgacctttgaaagtgcatcaacagaaacctcagctacgatattaccaaagccaggtgcaaagagtgtatcgcttgtcacctcatcctcgattgttacaccaagcttgttaccaaatgccatctttgatactgctgcggcaagaccttttccgtcaagtgcatatgctgaaacaattgcgccatcctggataagatttctgattgctgtataaagtgtcataacctgatcatattttggaagatcaaactcatccttatctattgtaaatagaacaagctggttgccctccttcttgagctcaggtgtgatgatatccttttcctttgccacatccactgcaaatgatacgagtgtaggcggtacatcaatatcattgaaggtacctgacatggaatcctttccaccgattgaaggaagtccgaagccaatctgagcatcatatgctccgaggagtgctgcaaacggctggctccagcgctttggatcctcattcattctgcggaagtactcctgatatgtcatacggattttgctgtaatctccgcctgctgcaacgattcttgagatagactcaagcactgcatatatagatccgtggtatgggctccatgatgaaagatatgggtcgaagccgtaagccatcattgttactgtatcacatttaccctttaatacaggaagctttgcaaccattgactgtgtctctgtgagctggtaacgtccaccatatggcatatatacactgcctgctccgatagagccatcgaacatctcaacaagtcccttctgtgagcatacgttaaggtcttcaagctctgcctcccaggcacccttcatatctcctgcctctaccatcttggctacagcaggtgtgctgattttgtccagataattgtcactctcgcaaggcatctcaacctcaacatcagtctcctgatgcgctccgtttgtatcaaggaatgcacgagagatatttactacctctttgcctctccactcaagcacaagtcttggatcctctgtaactaccgcaacctctgttgcctcgagattttcctcttttgcgtatgcaaggaactgttcaacatcagaaggcgcaactacaactgccatacgctcctgtgactctgagatagcaatctctgttccgtcaagacctgcgtatttctttggtaccttgtcaagctctatacgaagtccgtcagcaagctctccgatagcaacagaaactccgccggcaccgaaatcgttacacttcttgatgatatggctgacctcttctcttctgaaaagtctctgaagctttctctctgtaggtgcattacccttttgtacctcagctccgcagactgatgtagactttgtattgtgtgcctttgatgaacctgtagcaccaccgattccgtcacgtcctgtgcgtccaccaaggagaatgattttatctcccggatctgagttaagtctctggacagcacgtcttggagccgcacccataactgcaccgatctccatacgctttgcaacgtaatttggatggtaaacctccttgacatagcctgttgcaagtccgatctggtttccatatgagctgtatccgtgagctgcctccctgacaagcttcttctgtggaagctttccttcaattgtctgtgaaaccggtactgtaggatctgctgcacctgttacacgcattgcctgatatacatatgtacgtcctgagagaggatctcggattgctccgccaaggcatgtagcagcgccaccgaaaggctcaatctctgtaggatggttgtgtgtctcgttcttgaagtttacaagccactcctctgtctttccgtccacctcaacaggtaccacgatagagcatgcgttgatctcatcagactcttcctgatcatcaagcttgccctctgcctttaatctcttcatggcaagaagtgcaagatccatcaggcagacaaatttgtcatttctgtccttgtagatatttgaaaatgtattgagataatccttgtaggtattttcaatcggtgtgcggtagaagccatcgtcaaacttgacattcttaagctctgtagagaatgttgtatgacggcagtgatctgaccagtatgtatcgagcacacggatttctgtcattgaaggatcacgcttttcctcattcttaaaataattctggatatgaagaaaatccttgaatgtcatggcaaggttcaatgataaataaagctccttcagcttgtcctctgccatatccttgaaaccgtcaaatatgatgacatcagcagggtcatcaaactcctgcacaagtgtcttaggcttttccatgccgatagcacgcgaatcaacagggttgatgcagtgcttcttaatagcagcaaactgctcatctgtgatagccccctcaatcacatatgtgatagcacttctgataatcggctcctcattctcattgagaagcttcacacactgctcagctgaatctgctctctggtcaaactgtcccggtaaaaactctacagtaaatacttttgcatcaccatagtcaaatgtctcctcatagatatcatcaacaggcggctctgagaaaactgtatacaaggctttcttgtatgtctcctctgatatattttccacatcatatctgattaatacacgtactgcctccacagttgtgattcccagataatgcttaatctcatgctttaattcctttgcctttaccgcaaagtcaggttttttctctacatatacacgacgtacgttactcatatgttctcctttcaattcgagagtatgtaaccaattattcgttaccgtccggctttttgcacaatcggactttaaaactatggttgtagtataacactttagttatgataagtataattaatatatttaatttgttttataagttgcgttaattatagttttcttatataatgatataagggtcaaaaggtattttgccccttattgataaaaacagatgcaaataaccatatttatacggaggataacaaaatggatataaattatgagctttacaaggtcttttactacgtggcaacgtccctaagcttctctgaagccagcaagaagctgtttatttcacagtccgcggtaagccagtctattaagactctcgaaaagaagctgggacagactcttttcatcagaagtacaaaaaaggtacagctcaccgcagccggtgccctgcttttaaagcacattgagcctgccatgaatcttattgcccgcggtgaaagccagcttttagactcaggcacacttggacttggccagcttcacatcggcgcaagcgataccatatgccgttatctgctggttccttacttaaagcagttccatcagaggttcccgaatgtgcctatcaaggtcacaaatgccacatctatccagtgtgtggagcttttggagcaaaggaaggttgacctgattgtcacgaattttccaaactcgcacctcaatcactcatacagacagaaaaccatatgcaacttttccgatgtttttgtggcaaatcccaattatttcaagcttcgcaagcaggagatagctttttccgagctcaataaatatcctatcatgatgcttgaccgaaacagcacaaccagtgaattcctgcataatctgtttttacagcaccagcttgacctgattccggaaattgagctaagcagtaacgatctgctcatagacctggccaaaatcggactgggtatcgcattcgtgcctgactactgcatcaaccatgagaataaggagcttttcgttctgaagacaaaagaaaagatgcctccacgccagattgttgtgtccgtaaacactacaatgcccgtgtcagcatccactgaggaatttttaaatctgctcccagaagtcggcaactagttttccgacatttgctatattgcatggctttctgtcactccactcgcgtggatagagcaaatcatattctctctgccagaatctctcatctaatagcaaaatgacacctgtgtcctccgtcgtcctgattactcttccggccgcctggaggactttatttatacccggatacctgaaagcatagtcaaagccacagccgttttcggcatcgtaataatcctttaatatagttctctcattgctgatctgcggaagccccgttccgacaacaatagcacctatcagtctgtcgtttttcaaatcaatgccctcaccgaatatgcctcccatgatcccaaaagccacaagtgttctgtccgattcctcactaaacctgtccagaaattcctccctctcagcctctgacatattatttttctgcagcataagctctgtttcgtctgcatatttttcacagtaaatatctgccacatcattcatcatcttatatgacggaaagaaaaccatatagtttccggtcttttgtgtgacaacagcattaatatatcctgcaatccgctcatactcactccttgagcgccttgtgtacctcgtactcacatcggttgccatcgcaagcagcctctttttgctgtcaaacgtgctgtcagcatatatggcatagttgtctttttttgtgcttagcaggctcttgtaatagtttacaggcaaaaatgtcgccgaaaaaaacacagctgacttgcccttatccagcctcttttgtatattaagcgatgggtccacacaaaaaagctttagcatgaacctgccatcagcctcaagctcggaatacatcacgtagtgctcatccacaagatcgtaaatgttcaggaaattgcgaagctcaaaataaaaatccataacatcctttttccccgggaactcattagctttctgcaaaaactcatccagaagtgtcataagcctcataaaggaaaataccatattgccaagtgtatcatataccgtgtaattctcacactcacgcttcatcccaagcagtatcttattgcacttttcaagcgctttctcaatagaacggctgtgctccttcataatgcgcttcacagtaaggaaatcctccttataaatctgagcgctatacatctgcctgcttctttcgaccatattgtgagcctcatcaatgagaaaaatataatctccctttatcccctcctgaaaaaatctcttaagataaacatttgggtcaaacacatagttataatcgcagatgatattatcacaccagctagccgtatcaagacaaagctcaaacggacaaacggtatacctatccgcctgtgataaaatatcatccctctcaatcatttcacatctgtgaagcaggtcaaaaaccgcatcatttactctgtcaaaatgcccctttgcatacggacaggttaccggattgcattccatctcatcacacggacatagcttttccttggccgttatctgaatggtttttgccctgtaaccatttttttcaagcaacgcaaacgtttcctttgcgactgttgcggtgatcgtcttcgctgtcaggtaaaagattctgtctgccagctcctcaccaaccgccttcactgccgggaaaatagtagagatagtctttcccacaccggtcggagcctgcataaaaagaagcttctgacgcataattgtcctgtagacatccgaaacaagctttttctgccccggtctgtactcaaatggaaaaccgagttctttgattgaagcctgtctttgatttttcatttcacactgaaacgttgcccatttgccatactcttccatcaggtcatcaaaccatttttttatctcttcaaacgagaactcctcgcgaaaatacttagtctgctccgtttccagattgcagtaggtcatctgaatgcctatcgtttccatattattttgcagagcaaaaatatatgcatagcacatagcctgcgcacggtgcacaaaaaccggattttcaaacagctcaacccttctgtacattcccttaatctcatcgacaaaacacttgccatcctccgtaaagatgccatctgccctgccctcgacagtcagctcatacaaatcaccttcaacaacaagtgaaagcggtacctctgcctgatactccttccccatgctgccctggattttcctgtgaatgcgtgttccctccatcatggcatcggcactcatagctctggatgaccggttgtctatgtcaccctccctgaaaataaattccacaaggtttctgaccgaaatatgtaattgtgttttcttttcactatagttatttccagcttctgtcatgtactctccctgcatattccggattatgttaccggttttgtgttccggcaatattttcagtctaactccagacatttttaatacactgaacataaaaaagggagagctccaagaagaaactctcccaaaggaccttattcaattgtattacgctacagtgaatttatcaaccacattatcaaatgcctggtcatcgcccatatagcagaccttaaagtcattgtttataccaattccaatcactccaagaagtgatttcgcatcaataagaatctgtctatatttgagatcaatgtcaaaatcgcacttagaagcagccccaacaaattcctgaacatcatccaatgtgttaagtctgattactgtttccttattgtacatagttaacaccacctttataatctaaaacatagtgctttcgcacatgccaatcaattgttgcgcctattataacatctgatattcatttgtcaaaaaaatcataatccgtcattttccgtcaattcatgtcattttttttaataaataacttttgcgtaaccgatttttcactatattttcatgcatgttttttcaaaaaaacaatataactgtgaaattcttacaaaaatggcatgatatttaattaattcaagttcattttttacaatttttcatttataaaactttattctcgtaattctttaacgcatctatatatatttcaccgagcttgctaagcttcgtgcccttgtgcttgatatagcctatatgcattttttcactttccttaagtggaattgccgcatagtcatcaccgtttaaatcctcagaaataatacctgagcacagtgtaaatccgttgagccccaccatgagattgagcattgtggctctgtcatcagcctttatgacacgcttgtactcatacgtgctcatcatctcctcagcataataaaaggaattgttcacgccctgttcaaaggtcagacatggatattcctgcaaatcatcaagtgtaatcacttttttgccggcaagcggatgttttttccagagatacacatatgtattgcatgtgaagagctctttaaactcaatgtcacattccttaaaaagctttcttaaaaccttttcattgaaatcacttaaataaagaactccaatctcactctttaagttctttacgttgtctattacctctttcgtctttgtctcgtggacagcaaactcgtactcatccatgcccacctctttagcaagctgtacaaaggcctttactgcaaatgaatagtgctgcatggaaaccgagaatttctttttggactccacattcagataccggttctcaagcagatgatactgctccacaacctgtttggcgtatcctaaaaactcctcaccctccgctgtgacggtaatcccacggttatttctcatgaataccgtgattccaagctcctcctccacctctcgtactgtggcggacagattgggctgtgaaacaaaaagcttctttgccgcctcattcatggaattggattctgcaattgtaagtacctgtctgagttgttgaagtgtcattttctctcctattgtgaactgacggtttttagcagaatgtgtaactattcagcgcccaggcaccttcgtaaaaaccgcacaattgtaatatattagataaaattatgtataaacgatgccctgtgtatcggtgatggtcctatctcctttagtgccttgatatgatctgccgagccatagcccttgtttgatgcaaatccatagccgggatatattctatcatactcaaccatcatccgatcccttgtgaccttagccacaatactggctgcccctattgatatgcttttggcatctccctttataatcggaacctgctttatatccacccccgggattgtgactgcatcgttaagtgtcaaatccggtgccggatcaagctttccgattgcctgtctcattgcctcatatgtagcctgcaatatatttatctcatctatccgctcgtgcgatgccatacctattcctacagaaaccgccttttccattatgacatcgtaaagctcatcgcgctttgcagccgtaagcttctttgaatcattgatatataaaatatcacagtcctttggcagaataaccgcacatgccacaaccggacctgcaagcggtccgcgtcccacctcatctatgccgcaaatatgagcatatgatgcgtactcacgctcatatttcttgagaccttctgtgcggataagctccttctcatacttgtccagacgcttttttgcactatctacaagcttaatcactccgcccctttcatctgagccgtatgcctcaatgaactgtgcaagctgtgaatctgtgatgcttttcagttgttccttaatatcgcctattttttctgctgacatatccttgtcctatcgtctattcttcagaatatttcttcttaacttttcttcataattattcttcgcaactatttttcgtaactattatcctattatttttccggtctctcaagagtgatattgccaagcttaccgcttctgaaatcatctatgatgagtgcagccgccttgctgtaatcaggctctcctccctttgaaaggcattttctgttgacagcgacagcacttataagctctatgatatcattttcctcgcttacctcgtatctttgtgccaaaagccccggatactctgcttttagaaactttacaagctccacggcaagctcatcaacatttaaaatctcatcctttatcgaaccgatgagcgcaagtctaagtcccactgtctgatcttcaaatttcggccacagtatgcccggggtatcgagcagctcaacacttttattgagcctgatccactgcttgccctttgtcacgcccggcttgtttcctgtcttggcacaggcttttccggcgtatgagttgataaatgtggactttccgacgtttggaatacccaccaccatagctcttaccggtctgtttttgataccacgctttcggtctctttcaatcttttccttgcaggcctccatcacgatatctgtgatgctcttcatgcctgacttgcttctagcatcaagactgactacaaaaaagcccttttccttgaaaaatgcactccactccctggtgcgctccttgtcggccagatctgccttgttcataagaatgagcctgtatttgttttttccaagctcgtcaatgtccggattacggctggatagcggaattcttgcatccacaagctctataaccagatctattaatttaatgtcctcctgcatctgacgctttgccttggtcatatgcccagggtaccactgaaaattcataattcacctgtcctttatctatatatgttataactattgctacttgatggttccaaagcttccaaggcctgaaaatctaaaccatgccttgccgataatatagtctctctttacattgccaatattggcatagcggctgtcctcactgttgtttcgattgtctccaagtacaaaatactcgtccttttctagctctataggatctgaggcaagccctgcatcctccattgaggcaacgtctgttgattccttgtacagctcatcattcacgtacagtgcgccgtcttttatctgaacagtatctcccggcaccgctaccactctcctgacataataatgcgacttattatttccgtttggcagaaatactatcacatctcctgcctttggctttgacatgatatatgcaaacctgttcacaagaatattatcatcgttctccaatgtctgctccatagcctggcccactacatttgtacgtataccgaaaaatgacaccagcacatatgccagacctatcactacaatcagctccactacccacgaaacaatttccttgaacaatggcagattaaattttcttctttgccttctaaagctaagtcctgctcgtcttctggacatcttacacctcttgctaactaatattttattgcgtaatcttaattatatattgttttcatgtttgttgcaagctgtaaccctgaaaactaaaaagaccattctcatacgattgctcgcagaaaatggtctctttcgcgtaaaaatattattttacaagctctttaaccttagcagcttttccgatacggtctcttaagtagtaaagcttagcacgacgtactttacctttacgtacaatctcaaccttctctacgtttggtgagtggagtggccatgtcttctcaacacctacaccgttagaaagctttctaactgtgaatgttgtacggtttgatccgttctgctttttgattactgttccctcgaatacctggatacgctcacggttaccctctttgatttttccgtatacctttacagtatctcctacagaaaactcaggtgcctcggcctttaactgctcgttctcgatgctcttaataatttcacttgcgttcattttgtgacctcctaattattttgacgttcttaatgctactactattttcacaacagaggaccatctcttttattcacaacattggtactttaccacagattcatgggatttgcaagtattttttactatcttctgcctacctcatgcattatttttagtcatccagtatacgggtgattttgaaaaatgcaatcccatactctcctgcagcctcatagacgcatcattgcccacgattatctgtccatatggtatccatccgttctccagtgccctgttgaatgcatatgtttcaagtgctgtggcaagcttttgatgcctgtactgcggctttacatagagcatgcctatgctgccctcctcatggattccgataattccagcgagggtattaatggtatcattagcagtattatcaccaaaaaaagcgccatagactgcccctgcctctatcctgtctacgatatagtccggattgtcaaaacccgggtacattggcgcagcctcctgtatatcagctgcatccagctttcttataattaagccatttggcatcggctttccatccggtctgtacagtccgctgacagatagcttttctttgtttgtatacaccgcctgtctgcactctacagtctcattaaagccatttgctgtaaagagctcaacatatctttgctggtgaagcactatgccatttgtgatctgatctgtaacggtttttggaatatgctgactgctgtatttatcaacaggctttgtgtcatcttccggtgccaaatcaataagcttcgactcgccctcatccggtcttgtatgaaagcatacatttgagaccatgtcccgaagcagatattctccatctgcctcaaacagtatctcggcgcagcccctgtttataagctctatcatatcaatatgaagcagtttatttttcataagaaactctctgcatttatcaagtcttttaaacccggcatacaaatccggtctgcgctcctttgtgcgctcaatagacttttcaaggcgccatgcatctatctttttctgattgcctgacatgagtacctcaggcacctttttgtcatgccactcaacaggacgtgaatactgagggtattcaagcagattgccatgaaacgactctgtctctgccgaaatgtcattgtgcagcaccccaggaaccagacgtgaaattgcatctatcattaccatcgacggcagttctccgcctgttagaacatagtcaccgatagagacataatccgttaccgtctcctccagcacgcgctcgtcaataccttcatagtgcccacatagaaaaatgaggtcatcacactttgcaaattctgccgccatctgctggttgaacacgctgccctgtggagtaacataaatcagacgcgcattgtgattttttatttcttctgcagtatttttatatgatgtattttcatataatatattttcatcggcgatatttttcccggaattatcacctgaatggacctgattacatttattgatctgactcaccacactgcgcacagcctgatacaccggctctgcctgcataagcatccccgcgccgccaccatatgtgtaatcatcaaccttattgtgcttattgtgcgcaaaatccctgatatttaccgtattgagtgatataatattctgttttaaagctctgcctgtgatactctctgacagtccctgttctatcatctgtgggaataaggtcagcacatgaaatctcatttcctatatctcctatatcatcctgttttacagttttacgatttaaaatgtatgattttgttcaattttatatctcattttacggtttttgcagtttgagatgtagctatctcaaacctgccagcagatgcaccttcatcgtgccattttccacatcaacgtccagtatacaatcctttattgccggaatcagcagatcatttgcaccggctttcttaacaacatacacatcgttggcaccggtctggagcacatcatctataactccaagctcctctccttcgtctgatgtgacggaaagcccgataagatcagctataaagtactcattttcctcaagtggcaccgcattttcccttgtcacaaaaagaggtgcctttttatatttttctacatcatttatgtcatctatgcccttaaatttcaagataacctggttcttgaaaaatttgacagaagttatttccaaatccctgcgctctttgccattatccagaatgacatttttaagctttttaaaacgggcagcatcgtcagtggttgggaacacctttacctcaccgcgaatgccgtgtgtgctcgtaattacgcctacctgtagtaaatcttccattctctgtctcctgatattaatataaatcatgactattcagcccacgcacattctcaaaaccatacaataccggttctgaatagttactttaaattataaaaaaacaggcatctcataagagatgcctttatgttactgtactatctcaacaataacctttttgtcttctttagaggctgcggccttaacaactgaacgaatagccttagcaatacgtccctgcttgccgatcactttgcccatgtcagactgtgcaacacgtaattccaaaacaattgctttctcgttttcggtctcagttacattaacctcatccggataatcaactaaagattttgcaattacttcaactaattctttcattacgccacctctttatcctatttctcgataccagcactcttgaagattctagctactgtctcagttggctgtgcgccgtttgataaccatttcttagctaattcctcatttacatgatactcgctaggatccttagttggatcgtatgttccgatctcctcgatgcatcttccatctcttggtgatctagagtctgcaactacgattctatagaaaggagctttcttctgtcccattcttcttaatctgatctttactgccattttgtttcacctcctcataggtttattgaataatatatatcaaaagtaaaataaatacttttgttaacaaaacatgaaattctttaatgaaattcctttaataaaatccattaaaacggaagtcctttgaataatcctccaagaccaccgcctccacggcgtcccttcttgccgcccatcataccgggcatctgcttcatgaacttctttgtctgctcaaactgcttcacaagtctgttgacctctgatacatccacgcctgctcctcttgcaatacgagccttgcggcttggattaagaagctttggatttcgtctttcctcaggtgtcatggaatagatgattgcctctgtgcgggccatgcccttttcagcttcatctgtatcaatatccggcatcttgcctccaccgatacccatgcccggcatcatgcccatcacgcttgaaagaccgcccatcttcttcatctgactcatcgaatcaaggtacatctcaaaatcaaactcatttttgcgcatcttctgctcaagcttcttggcctgttcctcatcaatgttctcctgcgccttctcaatcatggaaagcacatcgcccatgccgaggattcttgaagccatacgctccggatagaactgctcaagatctgaaagcttctcgcccatacctgcgtaaagtatcggctttcctgtaacggctctgattgaaagtgccgctccacctctggtgtcaccatcaagctttgtgatgacaactccgtcaattcctatcttttcatcaaaggtacctgctacatttaccgcatcctgacctgtcatggcatcaaccacgaggatggtctggaaaacatcagtagcttcttttatctcaataagctctgccatcatatcctcatcaatatgaagacgtccggcagtatcgatgataacaacattgaaatcgtttttcttagcgtgctccacagcagcctttgcgatgtcggcaggcttgtttttgtcacccattgagaaaacctcaacgccctgcttctcaccatttatctttaactgctcaatcgcagccggacgatatacatcacaggctacaagcagtgatttcttgcccttgctcttaagctttccggcaatttttgctgtggtggttgtcttaccggctccctgaagacctaccatcatgataacggtaagctccttgcccggcctgaaagcaatctctgttgtctcagagcccataagcttaatcatctcttcgtttacgattttgatgaccatctggccgggattgagaccattcatgacatcctgtccgattgctctctcctgaacactctttgtgaactgcttaacaaccttgaagttaacatcggcctcaaggagtgccatcttaacctctttaagagcagcctttacatcatcctcagtaagctttcccttgctgcggagattcttaaaaacgttctgcagtttttctgataaactgtcaaatgccatattacagctcctctagtatctgattcgaaatagcttcgatttcattcattaatagctcattatgtgatttcttaaaatcatttgtcagctcatgaatccttcgtatgtcactctttatggacatgaacttttcaacaagatgcaactttgcctcatagtcaagcagcttcttattgcatctcttaatcagatcggcaacaccctgacgggaaatcccctcctcggatgcaatctcaccgagtgacaaatcattgaagacaaaatcctcatatacctgacgctgatgctcattcaaaagctcaccgtagaaatcatataaatatgcctgttcaagtttttcttccatatcaagtatcctctttttccctcgaacctatggtagaataacacatagtttgcccggtgtcaagtaaaaatacttgatacttttatttttatatcatagtgcgtacaattcttggcttatagcccttcttctcgagcgcagcaataatctgctccttgtgctctgtaccaaaacactcaagcgtgatgcgaagctcgacagccgcacttctgtttgtagtgacaaactggttatgctccagcttgattacattgccctgtacatcggcaagagtctgtgaaaccttggcaagctcgcccggcttatccggcagaagcactgaaacagtaaagattctgtctctgaaaataagcccctgctgtacaactgatgacatggtaataacatccatgttgccgccacttaggatagaaaccactctcttgtcctttactccgagatgcttaagcgcagctacagtcagaagacctgagttttcgactatcatcttgtgattctcaaccatgtcaaggaaggccacgataagctcgtcatcctccactgtgataatatcatcaagatttttctttatgtatgggaaaatatttgagcccggtgtctttaccgctgttccgtctgcaatagtatttacacttggtaaagtggtcaccttgccgttcttaaatgactcctgcatacaattggcaccggccggctccactccgataaccttaatctttgggtttaagagctttgcaagtgtggatacacctgttgccagcccgccgccgccgattggaacgaggatgtactcaacaagaggaagctccttgaatatctccatagcaatagttccctgtcctgttgcgacagctaaatcatcaaacggatggataaatgtgtagccctctttctctgcaagctcatatgccttggcacatgcctcatcatacacatctccgtaaagcactacctcagcgccgtagctctttgtacggtttaccttgataagaggtgtggtggtaggcatcacgatgacagccttgcagccatagcactttgcagcatacgcaaccccctgcgcatggtttcctgcagatgctgtgatgagtccctttgccctctcctcgtctgtgagggtgcttatcttgtagtaagctcctctgaccttgtaagccccggtaaactgcatgttttcaggcttcagatataccttattgcctgtctggtcacttaaaaagtcactgtaaatgagctttgtctcaagggtgacctccttgaccttctcacttgcttcttcaaatttatctaatgtcagcatatttgttctccctttcatttcttcggtataactattcatacccacccacacattattcgcaaaaatgcattgttctcagtggttctgaatagttatttttcattatattataccaaaaattccgtacagatatatataaactgatatatcagattattataaacaatataacttatacgctcaaagatattctcaaattattccgttttagtgtcaaacaatgcattcacgaactcgtccgaatcaaatttctgcaaatcatcgatggtctcaccgactccgatatacttgaccggcactgaaagctccgactgtattgctacagcgataccgccctttgccgtaccatccatcttagtaagcacgatgcccgaaatctttgccacatcagaaaactctctcgcctgaacaagtgcattctggcctgtagtcgcatcaagcacgacgagtgtctctctgtatgcatccggatactcactctccaggattttattaatctttccgagctcattcatcagattctttttgttgtggagccttccggctgtatccacgagaagcacatctgcgtttctggcctttgaagctgcaactgcatcatatacaacagctcccgggtcagcaccttcggcaccgccaatcatatcaactccggcgcggtttgcccattccttcagctggtctcctgctgccgccctgaaggtatcggcacctgcaataactaccttcttgccctgttccttaagctttcctgcaagctttccgacagtggtagtctttcctactccgttgacaccgattacaagcacaacagatttttcattttcaaatctgtaggctgtctcctccaccttcatctgctccttgatgctctcaatcaagagttccttgcactctgccggctccttgatgtgctgctccttaacctttctctgcagatcctcgatgatactctctgtagctctcaccccgagatctcccatgatgagaatctcctcaagctcctcataaaaatcatcatctatatgcgaaaatccactgaaaagtgaatctatgcctgaaacgatgttgtctctagtctttgtcagtcctgaaacgagcctcttaaaaaagcccggcttcttttctttttcttccattttaactctccataaataaaattttactgtgtcagatcattctctatcagattcactgaaacgagtgttgaaacacccttttcctgcatcgtgataccatatagtctgtccgcagccgccattgtaccacgtctgtgtgtgataacgataaactgtgtgttctttgtaagcttgttcagataatttgcatagcgcgaaacatttgagtcatcaagcgccgcctcaatctcatcaagcagacaaaacggtgatggcttaagtgcctgaatggcaaacaaaagtgcaatagcagtgagcgccttttctccacctgacatctgcatcatattctgaagcttctttcctggcggctgtgcgacgattcttatgccgcactcaagtatatcctcatcctccacaagctccagggaaccatgtccaccaccaaaaagctgcttaaaggacttgtcaaactctctctgaatctcggcaaacttctctgtaaactgctttctcataccactgtcaagctcatcaatgatgccaaccagagtcttttcagcctcgataaggtcatcatgctgtccctttaagaactcataacgcgttgaaatctccctgtattcctcgatagcattgacatttacatcgccaaggcgtctgatttcgtcctttatgcctgcaatcagcttctttaatgaaggcagatcatcgtatgcatcatttctaagctctgctgccgcatgcggagtaagctcatattcatcccacatgtagttggtctgagtctctgaagcctccttaagcttctctctctggctgttcagtctgaaaagctccttatccagatcagcctgtttctttgaaacttcctcctgctttgcaaaaaagcctctgtaattttcagacatcttttcctttttggcaatgctctccctaagctcctcgtcaagcttagaattgttgtcctttgatgccagaattgtctgtgtgattgcatcaatatcagcctgcttctttttaatatcatcctttgcagcagctgcaccttccacaaggctttccttctgctcatcaaatttctctatctctgaattgatacgattgatattttctatagcaaactctgccgtctttgtaatatttgcaagctcaagtgaaatggcagcggccttgtgtgaagcctcctgctcaagtactccctgcttctcaagtatctcactgtatgagctgttttccttctcaagctgctcctcacgctgctttgacgcctcaagctgcgctgcaatatccttcttgccctgatttatctcttcgagctgtttttcaatctcagcattttctgtgctcagatcctcgtagacattcgcactctccttcttttgctggtctgccctgtcaacagaaatctgtgctgtgttctgctcaatatacttctcctgcagcaaggtctttgtggctgctatatcctcctcgccaagcgcaatagcagtcgcaatatcatcctttctggctctaagctctttaagctttgtcttagtctgatcaactctcttttcaagctcctcaatctcacgatttctcgcaagcagattggatgaatttttaaacgcaccaccggacatagagcctcccggtgccagatactcgccctcgacagtcacaatatggagtgaatagtgatttttctttgcaagcgcaatggcattgtcaattgtgtccaccacaatcactctgccgagcaggtatgcaacaacctcatcaaacttcggatcacacttcaccagcttatttgcaatgccaagcacacccttttcgccgagtgccgcctcattttttgtatttctgtttgcgcgcacactagtaagaggtaaaaacgtagcccgtccaaaatgattggtctttaaaaagcctatcatctttttggctgtggcctcatcctcagtgacaatattctggatattaccgcttaaggctgtctctatcgctatctcatagcgcttatccacctgtataagatctgaaaccactccgagaagccccggatttttagctttctgctccataacacgcttgatgctgttaccatagccatcatagcgctcggcaatgtttttaagtgactcaagcctagaaacagacttatgatactctgtggaagcctcctccatcaggcaggcattctctctggacttatctctccactccctagactttgccaaaagagccgactccttttcctttaaactggctatctcttcattgacagcattaagcttcttattagcctcatccaatatatcatcaagccctgcttcccttgtctttctatctaaaagacgcttggtaagctctgcctttctgatattaatctgctcaagcatagtggcaaaacgctgctgccttgactggatactgcctcgctcctgaagcagggcgataagctcattcttgcccttttccagtccgtcattgcagcggttaacctctgcaagcacagcctcatgctcgtttaccgcaagaagctcgttcagcttcatctgctctatatcagcttccagtgcagcttttttgtcatcatactctttcctgcttttaagacgctgcgccttttccttttcgatagctaaaagacgcgactgaagatgttcatcagtcatttcagccgtgtgaatctgctcctttaaaagctctatctgattctcaagcttctgtctggtggatgaagtgcttgtgatgctctcacgaagagactcgatacgctcatccatctgctgcatatcgttcccaagcctctcatactctgccttgatgctctcgtatgtggcgttggtctcctttagctcgtcatccgcaatagcgtatttctcatcagctgacttaagctcggtctcaatgcgcgctgactcaagcaaaaacatgttgacatcgtagttcttcagttcttctctctttttaagatatgtatgagccttctcggactgtctctgtaacggacctacctgtctctcaagctctgtcaggatatcattgacacgcacaaggttctcccgctcattatcgagcttcttttgtgctgtaagctttctctttttaaacttcacaatgccggcagcctcatcaaacagctctcgcctctcttccggctttccacttaaaatcctgtcaatctggccctgtccaatgatggaataaccctctttaccgataccggtatcatagaaaagctccgaaacctccttgagtctacacggattgccattgattagatactcactctcccctgaccggtaaacacgtctggcaaccgtaacctcattgaaatcaatcgcaagcgaatggtctgaattgtcaagtgtgatggcaacatacgcgtatccaagcggcttcctgttctcagtgcctgcaaaaatgacatcctgcatgctggcaccacgaagctgctttgcgctctgctcaccgagcacccatctgaccgcatcggcgacattactctttccactgccgtttggcccgacaatacctgtgatgccgttgtggaactcaaaaacaattttgttggcaaaggacttaaagccctgtacttccaaactctttaaatacattaaaaactcctattccctgtttctgtacaaaagaagtgcctgatatgcagcctgctgctccgccgccttctttgtgtggccttctccctcgctgacacgctcgccgtccacaagcaccgcaactgtaaactgcttgtcatggtccggaccgctctcatcaataagttcataggaaagctgctcgtgtctgccctgtataagctcctgaaggatagtcttgctatcataaaagagctgcttattctcaatatcagtcatgataaacctaagcacaaactcctttgcattagtaaaaccaccatctaaataaattgctccaatcactgcctcaagtgcatcagaaagaatcgattttctctttctgccacctgtatgatcctcgcccctgccaagacgtaagtactttccaaggtcaagtggctttgtacaaagtgcaagagtcggctcacaaacaatgcttgcgcgcagcttggtaagctcaccctcaggcttttgcggataattgataaacaaaaactcacttgaaactatttccaaaacagcatcgcccaaaaactccagacgttcgttatcagaatgctttttcatgtgcttttcattggcatacgagctgtgtgtcagcgcctgctcaagcagatgtcggttcttgaacgtatagcctattttgctttgaaattcatttaaatctgccataatttttcctctatttctatatctatccatttacatgttccgtgagtataacgaaaagccctcataataaagggcttttcattagttaaacatactactgctcgcttacagcttttttaatctgctcaacagcatcgcctacagtgacgattttctctgcttcctcattaggaatctcgatatcgaactcttcctcgatacccatgataatctggaatacatccagagagtcagcgccaagatcatcaatgaaggttgactccatagtaacctcggtctcgtccacgttaagtacctcgacaataatgtctctaagcttctcaaattccatttttaatacctctcatttctgtttatagtgaccaatcatacagcagtactgctatctaatcagccggcttattaataatatattctttaattttatcattaatctctttttccttaaatgtaacacattggaaaacagagttagtgatttcctttgccttggagctgccgtgggtctttaccacaagaccattcaatcctaaaagcggtgctccgccgtactcggtcgcatcaaatgactttagcgtattcttaagagccggaagtgcaagtgcagctcctatcttgctctttaatgtgctcatgagccccttcttgataaccccgataagagtggagctgagaccctcgtagagttttaatatgacattgcccgtgaaagcctcgcagactataacatcggcatctccctttggaatatcccttgcctcaatgcttccgacaaaattgatatctgtgcactctctaagaagcggcatggtctcctttaccagggcattacctttctcctcctctgcaccgatattgaccagtgcgacctttggattcttcacgccgacaacatgctccatatagatagagcccatcttggcaaactgtaccagatgctcagctctggcatccacattggctccacagtctatgagcagagatacgcccctctcagtcggaataagcggtgccaaaggcggcctttgtatgccctttatcctgccgactattacctgtcctccgacaagtacagcacctgagcttcctgccgaaacaaatgcatcagcctctttattcttgaccatattcatgccaacaacgattgatgactgcttctttcgtctgattgccccaaccggtggctctgccatctctataacctcaggcgcatctactatctctatctgctccttaggatatgtatacaaagaaagctccctctctaccggtaccttctgtcctacaagaaatatctttatatcatttcttttgttaaccgcatctaccgcaccctttactacctctgcgggtgcattgtcgccacccattgcatcgagtgcgacccttgttgtactttgcattgtgacctccctgtgcctgctaaaaagcaaactactaattgattaaataaaatatactataatcataggtataaatcaataaccaattcactactctatatggcttccatcattctcccggactcattgaaataaccttgccacagttccataaatcagcagtgcgctttgctgcatcaagtctgtcatcgtctgacttaaaatcaatatttactgagtggcatccgcactcaagacatgtcacataatatgagctgccacagtcctcctcgagaatcccggcaccgccacagagcgggcactcatagatttcaactaaatcgtctatattattcatgatagtttgcttccttctttctttaatatctaaatatcctctcagtataataacatccctgcaagctatatacaagcaaaaagtaccttcattttattatgggataaaaaagggataaaatcaatcaaaaaaaggattgaacgatatcgttcaatcccttaattttactggttttctactattagtcctgaggaatgatttcttttttgttgtatgatccgcagttcttgcaaactctgtgtggcatcataagctctccacatttgctgcattttactaaagtaggagcagacattttccagtttgctcttctcttatctcttcttcccttagaagatttattctttggacaaattgacatttgtttacacctccttaaacttgttaaatatatcctggaacgctgccattcttggatccggtacaaaactatcgcaactgcaggtgcctttattcaagttcatcccgcagactttacaaatacctttgcaatcgtctttgcacagaactctcattggccagttcaccagaatttcggcgtagacaagtttatctacatcgagttcaaacccaatcaggtagtcagtttcctccatctcttcatcgactaatgctccgtctgtgattttcagagtcttgtcaatgtcaaaatgcatgtttgttggaacttcttccaaacatcggctgcacggtatcgctatgtctatatccactgttcccgtgatgtgcactgctgcattctccacgtttgagatatgaagtgatatcggctgctttttcagaataggataatctcctaaacgcgactcaaatgatgtgagcgtaagctccgtctcaattgttgtctctttattgatagattttacaatggttgatatatcaatcatagttctctcctattcacacctaaccaattatacatattggagtggtgtttgtcaacaaaattttataatttatccacaactttttgctttttattagccaacaagctttactgtctcgcggcagattgcaagctcctcgtttgtagggatgacacatacctttacgcttgagtctgctgttgagataagtgcctccacgccgcgtgtcttgtcgtttgttacacggtcaatctttatgccgaggtaacctaaatatgccataattttttctcttacaaagcttgtgttctcaccgattcctgctgtgaatgcgatagcatctactccgttcattgctgctgcatatgctccgatgtattttgctaccctgtagctgaatacctctactgctgcgatggcacgctcgttgccctcattgtaggctgcctcaaggtctctgaagtcacttgatactcctgacatgccggctactcctgacttcttgttgagcacatccataacaccatcgatgtcgagattttctttctttgcgatgaactccatgattgatgggtcgatatcacctgaacgtgttcccattacgagtccctcaagtggtgtaagtcccattgatgtatctacgcatttaccgtttaatactgcgctgactgaagctccgtttccaaggtgtgctacgataatctttgagttgtttaagtccattccaaggtagcttgctgcctcctttgatacgaagctgtggcttgtgccgtggaagccgtatcttcttaccttgtacttctcatagtactcatatggaaggccgtagagatatgctttctcaggcattgtctgatggaaggctgtatcaaatactcctaccattggtacgtttggcataagtgcctggcatgctctgattccgataatatttgcagggttgtgaagaggtgcgaggtcgttgcactcctctacctgtgctattacttcctctgtgatgactactgagtctgagaacttctctccaccgtgcactacacgatgtcctactgcatcgatctctgcaagtgattttactgcgcctgtctttggatttacaagtgcatcgagtaccatctggatggcctctttatgtgttggcataggtgcctctgtgatttccttatcaagaccctctttctgatatacgagtctgccatcgattccgattctctcgcagagtccttttgcaagtacctcctctgaatctgaattgatgagctggtatttcagtgatgaactaccgcaattaattactaatacattcattgttttgtctcctttggtttaaaattacaatactattgttagtataaacttatttttcaaatgcgacaagggtgtttttgtggtattatggttttgaactctaaaaaaaacattattgattaaaggagcagcaaaacatgaaggtcgcaggtgtgattaccgaatacaatccattccacaatgggcacaaatatcagctagagcagattaaaaggcagacatctgctgattatatcgtcgtagtaatgagcggtgatttcgtgcaaagaggtgagcctgccatcattgacaaatacgagcgcacacgcatggcgcttttgagcggtgccgacctggtgcttgagcttccatcggtctttgccactgcttctgccgagttttttgccggtggcggagtcagtgtactcaaaaacacaggtgtggtggacatgctgtgctatggtgtggagtctgtggaccatgagcttacaaagcttgttgctggcgtgcttaagaatccgcctgctaagtattccgcctctcttgcccggctgattcagagtgggatgagctttcctgcggccaggggcagagctctatgtgaatattttcaagatacctatgacagctcttccgagaaattagattctttcatagcttcacccaataatattctggccattgagtatgagaaggctttgatggactgtgatattacaggatttcctattcagcgcatcggtgaaggatatcacagcacggattcgacaagtgaattttcttccgctacagctgtgcgcggggtgatttcgaccttgattgatatagacaaacacaacactattactaatatacagcttgataattcatggatttccacaaagttcagtcagctaatgccatcagactgcgccgatattcttgtcaattgtattttaggcggtcatattgtgtttccggatgatatttctgaaatgctttactatcgcctgctgacctggaaggataaaggctttgcgcagtattcagactgcacaaaggagctttctgcaaagatagttaaaaacatttataaatatgaaggttttacgcagttttgtaacttactgaagagtaaaaatctgacttatacgcgtatttcaagggttctcatgcatattttacttggtattgagaataatgattttaacatatgtatggataatccttatctgcgcatacttggttttaaaaaatcatcaggagagcttatgcatctcctcaaaaaaagagcatcagtgcctattattacaaaagtcgctgatgctccgtacgagcttatttccaaggatatttttgctgctgatttgtatggcaggctgtgtcattcacagcaaaatgagtttacacatggggttgtaattatttaatctacagctccattataatttctcgtgccagactttcctctataggctttgcatacactcccggtgcaaactcaacagtggctcctatgcctttttggagcacgaagcgcagcttgccgtctctcacctttttgtcggtgtagagtttctttacaagctcttccctgtctatatagtcaggtatacgtgttggaagaccggctctctcatagagctttatcacgcgctctgcctgctcctccgacatatagccaagccgtgctgacataagtgcctgtgcagccattccaatcgacagtgcctctccatgcaacagcttgtagtcgctgactgtctcaattgcccggcctactgtgtggcccagatttaaggtttcgcgaagtcccgcctctcgctcatccttcatgaccacattgtacttgatacggcagttattttctgcgatatactcacatgcaaatttcttgaatgaatatatatcatccagattttcctctataaattcaaacatatcctcgctgcctaagcatgcatgcttgatggtctctgccatgccgcttgccatctggcgctgtggcagtgttttccaagcagctatgtctatatataccttttggggctgattgaacagacctatggtgttggtagcaagaggtgtatcaattgctgtttttccacctaccgatgcatctgccgccgctagaagggtggttgcatagttgataaacggcactcctctgccgtaggttcctgcaataaagcctgataagtcggttacaacaccgccaccgactgcaataatacagcagtctcttctgtacccctttttaagcatggcatcctctatctttgcctttgtctcacgtgacttgctcttttccccagccgggaaaacaaacaaatccactgagtatcccgcatgctttatcttctcacagattggaagagcataaggatcacgcacatttgtatctgtaatcactgcaaatttctttatcttgcccgcaagaccattttccaggtcagatacaagggtgtctgagaggttgtagcctatctcaatatcatatgtgtcatctactacttttttgagttctacattgaatatgctcattttttctcctgttatgctatatttttgtttcttttatgtgggaaactgctacagtatccccacagcctgcttggcgagcttatctgcctcttcgttgccccctactcctgagtgtccttttacctttacaaaagtaagctttattttatccttaactgacatgatgtattcgtgataagctatagtgcctgccttgtttcgcttccagtcccctgtggcccacatctctatgcccttgtagtcatagtatatgaccagttcattaattccaagctctatagccttttttacggcagcctccgcgccctttatctctcctgctacgttgcgcattgtggccatctcggcatcattatctgccccctgcagcacgtatttttcatggtcagtcacaagaaatcctccatagccataggtgtgtgttgctttgttgaaggagccatccacaaacgcatatgtactattttcgccggatgatttcatacctgtaatagttttctctccggcaataattttctctccgttaataaatttttctgcctcttctattgtcttaaagcttttatacactgctcccggatatccgtcaaccattgctttgcaatcgttccagttcaaatagatcccgggaacctttcccttttttaccgcatagtattttgatgccatgctttatttctcctataacactcttgacaaaaattcctgtaatctctcactctttggtgcgccaaatacttcctcaggtgtgccctcctcagctatggtaccctcattgatgaacatcactctgttggccacttctctggcaaagcccatctcatgtgtcacgactaccattgtcatgcctgcctctgcaagctccttcattactgaaagcacctcacctaccatctcagggtcaagtgccgatgtaggctcatcaaacagtatgacatcaggattcatagcaagtgaacggataattgccactctctgcttctgtcctccggaaagctgcgccggatatgcatctgccttatcgaggagacctattctggtgagaagctcatctgccttctttgatgcctcatccttcgtcatcacaccaagcttcaccggtgcgagcatgatatttgcctttatggtcatgttggcaaacagattgaactgctggaaaaccatgccgattttctgtctggtcacattgatgtctgtcgacttgtctgtcaggtctgttccttcaaaaaggatttgtcctgatgtaggtgtctcgagcagattgagtgagcgtaaaaatgtagactttccacagcctgacggtccgatgatggcaattacatcacctctgttcacctctgtgcttatgccctttaatacctcctgctctccaaaactcttgtgcaggtcttttacctctagtatcacgttattatctttcattgcttctcagtctcctctcaagtttgcttactccgtggcttaaaagcatcactataaccagataaataagggctacagcaataagcggtataaatgcctcgtatgtgttgcttcgtatgatatctccaccctttgtcagatccatcataccaatataaccactgattgatgtctcctttaggaggctgataaactcgttaagcagcgccggaagtatatttttgacagcctgcggtatgataacaagcttcatggtctgtctgtaattgagtcctaagcttcgtcctgcctcaaactgtcctatatctacagacatgattcctgaacgcacaatctctgccacatatgcagctgagttgaggccgaaagcaatgactgctacaagtatcttgttggtcacagatgcaagtactacatagtatataataagaagctgtatcatgacaggtgttcccctgatgatggtcaggtatgccttgcaaattccgtttaatatggcaagaccgccgtttctgtcatggctggttctgactatcgcaattaaaaatcccagcacaataccaagcattacggcaaatattgtgataactattgtattgccaagaccctttacgatatacatgtaacgattgtccttgacaaagttgtcatagagcttttcctttataccgattgaagaacccgactggctgtcttttacgataatctcctgctttgtggtgatatacgtatcggtaaaatcaacatttttctgtctgtcctctgtcactgtaaagcctgctgctccgacatccaccttgcctgatgatacagcggcaatgattgcgtcaaactgcatatcctctacctgcatatccatgccaagctcatcggctatggcctgcatgatatccatatcaattcctgtgaccttgttgtcctcatagtactcatatggcgggaactctgcattggttcctaccttaagtgtaccgtttgacctgtcaatgttcttcttcacgtagggagtctttcccacctgatcttcagagccgatatagttgtcgatgatgctctgaactgttccatcctgctgcagcttttcaagcgcagtgtttaccttgtcgcgaagctctgtattaccctttttcaggcagaatgcatagtcctcgttggtaaactcctcgtccagtatcttaagtcctttgttttcttttacaaaggcaagtgccggctgctcatcaataaccacgcagtcaatcttgccgacctttaatgcctggactgcatcagcacccttgttgtatctctctaccttggtgcctgaaccgtcgttctcataatcagatacatagatatctcctgtggtaccgagctggacacctatttttgcgccctccagatcgtccacacaagcgacctttttgctgtcgcttttgccgcatgcgcataagccaacgatgaatgtggccattaatgctgccataagcaaaatcataatcggttttttcttaatggatttcatattattcctcatttctgtataaatatttattcacaattatatcatattagtttataaaataaaagagcctgattttctcagactcttttataccaaatatttatgcatcatgctccatgttgcttaacttcttcgcctggtcggctgcgatacaggcatcaattatttcctggatatctccgttaagaatcttgtcaagcttatagagtgtcagattgattctgtgatctgtcacacgtccctgtgggaagttgtaggtacgaatcttctcagcacggtctcctgtaccgatctggcttcgtctctcctctgcctctgcatcctgcttcttctgaagctccatgtcatagagctttgtacgaagaagtgcaaaagccttttccttgttctgtatctgtgacttctcagtctggctgtagatgacaatacctgttggataatgtgtcagtcggactgctgaatctgttgtgttgacacactgtccaccgtttccggaagcacgcattacgtcaattctgatatccttgtcatcaatcttgacatccacatcctctgcctcaggcattacagcaactgagcatgtagaggtctggatacgtccctgcgactctgtctcaggcactcgctgcacacggtgtactcccgactcatactttaaaatagagtatgcacctgagccctttaccatgaactcgacagacttcataccgccgattcctgtctcatcggcatcaagtgtctccaccttccagcctctgttctctgcgtagtgcacatacatacggtagatttccgctgcaaaaagtgctgcttcctctccgcctgcaccggcacggatttcgacgattacgttcttgtcatcgttagggtcctttggcagaagaagtattttaagctccttctcaagctcctccacctgctcctttgaatccttaagctcttcctttgcgagctctctcatctcttcatctgattcctcatccaaaatagccagtgaatcctcgatattctgcttgcactctttatatttcttatatgtctcaactataggagcaaggtcactctgctccttcataagctttttaaatctgtttgcatcatttgccacatccggctcgctgagcagattcatcagctcttcataatggtgtataagatcttctaacttatcaaacatgtttttcctccttgctgtcaaacactcccgatactaccctgtcatttcccgccaggtcctttatcacatgtacatcgctaaatccggcaaactgcatcatctctgacacctgtctgccctggtcacagcctatctcaaaaagcagcctgccctgtggctttagatttgccctgcaatcctttatgatgcgcctgtaaaataaaagtccatcctcagagccgtcaagagcctcatgcggctcaaataccgacacctccggcatcagatgcggtatctcgtcgcttcttatatatggtggattggatactatcacatcatacatctcatcgacatgctcaaacagatcgcttctctcaaaatcaacaaacacgccgttaagccttgcgttttcctttgccacattgagcgcctgctttgagatatcacaggctgcaccgtccacattagttgtgttctttaagatgcttataattatgcagccgcttcctgtacacatatcaagcactctcatacccggctctatcaccttgagtgcctcctctacaagagtctctgtatcctgacgcggtatgagcacattgctgttcacacggaatttgagtcccataaactcctgctctccgactatgtactggagcggaatacgctcagcacgcttactcagcaatgcttgatattcccttatctgctcctgcgacatttcctcatccatatgcacatagtaatatgtgtgatttatcctgcatgccatggctaaaagcagccatgcatcgttttttgcatcaactatctttgctttttgtaatatgctttccccaagtaaaattgcttctctatatgtcatatataccttctatccggcggtcaatgtgcacacacattgttttcctcctgccatttcttccagtcaaacacggcctcaaccgatgcgatgccaacctctatcatttcatcatccggctcctttgtggtcattcgctgcattaaaagtcccgggacactaagcatgttgacaaccggattgtcatatctgcccgcaagtctgataaactcatacgatacccctgcgattacaggaataagcacaagtcgtaacaataactgcagcggctttgaatccacacggataaacatgaaaaacaatatgcttatgagcattactataagcagaaagcttgtaccgcagcgcttgtgatgctttgagctttttctcacattttccactgtaagaggcagtccgtgctctatgcagttgatgcatttatgctcagagccgtgatacataaatgtgcgcttaatatcaggtgtcagcgatataatcgctatataccccagaaatattgccagtctgataacgccctctatgaacgctatgagcatctgtgagcttatcacctttttaaaaaaccctgaaaggaaatacggcaatgcaaaaaacagcgcgagtgctatgacaattgacagtaccactgtacctccaagcatggcattttcctgtttcttttctttggcagccctttttttcttttcttccgctgtgagttcttcttcctttttctttgaagccaaggtaccttcatcatcctcgtcctcgaaaaatgacgctgaatacatcagtgtgctcatgcctagataaagcgaatcgacaaagctcaccacacctcttaaaatagggatctttctaattgcatcaagcgtctttgaattcttacgctttgacaccttgacatctatttcatggtcaggctttctcacggctactgcgtatgtgtccttgttctgcatcattacgccctccatgacagcctgaccgccaatacctgaatacttcataaaacctctctatattccaaaaaaggttgaggtatattgcaacctcaacctttcaagtaactatatgattctatttcataccatatttcttattgaactgctcaatacgtccacgagcctggttagctttctgctgacctgtgtagaatggatggcactttgagcaaatctctacgtggatctccggctttgtagatcctgtaacgaatgtgttaccacagttacatgtaacagttgcctgataataatctggatggattccttctctcatgattttcacctcttttatattcttatcgtatttctttagcttcactctttatacccatatgcccgatccgcatatgatacttgctgcaagagcgacacgttgcgtccgtttacatcccgataaacagcttaattattgtagcacatgaatctgtcaattgcaagacatttttataaaattctgtttttctttacaagattaacaaattccttgttgctctttgtgtgtgcaaacatgttgagtacgttctcaacagcctcatcagagcgcataccgttgaaggctttacgcatattatcgactgctgcctgctcatcctcatcaaggagcagatcctcacgccttgttcctgattttactatatctatagcagggaagattctcttctcggaaagctttctgtcgagtacaagctccatgtttcctgttcccttgaactcctcaaatactacatcatccatcttgcttccggtatcaacaagagctgttgcaagtattgtcagactgccgccgtttctcatattacgtgctgctccgaaaaatctctttggcatatgaagtgctacaggatcaagtcctcctgaaagtgtacggcctgatggtggaactgtcacattgtaagctcttgcaagtcttgttatgctgtcaagaagtatcatgacatcattaccatgctctacaaggcgctttgctctctctattaccatctctgacactctcttgtgatgctcaggaagttcatcaaatgtagagtagattacctcgacattgtccccctctatagcctccttgatatctgtaacctcctccggtctctcatcaataaggagaataataagatgcatctcaggattgtttacagtgacagactttgcaacctctttaagtaatgtggtctttccggccttaggctgtgaaacgatcatgcctcgctgtccctttcctattggagagatgagatctacaaccctcatcgcaacacttgctccgggtctctcgagacgcagtctctcattcgggaatataggcacaagatcctcaaagcttgtacgcttctgtgctacatccggtgtatatccgttgacagtggtcaggtataaaagagcctggaatttctcacgctcagacttcaccttcatattaccctttacgatatcacctgtctttaaattgaagcggcgtatctgcgcaggtgccacatagatatcatgatctcccggcatataattatcacagcggataaatccaaagccctccggcattacctcaagtatgccttctgcctcttctccactgtcgagtgctgcataatcatctttaaaagagttggcgcgctcctcggctgtaccgtttttctcagcctcctcagcctcttttgcatcctcctcgagcattctttcaataatctgtccctttttcagtgatgaaacgcccttaattcctcttgccttcgccagatccttaagcacaaatgccgacaaactttcatatttttctctcatctgttccatttcgtcttctccttaaatttgataacagtatttattcaattcgtctaaacaatattatttaacaaatatatctgtgtagctattgggaaataacgcctgaattgacttttgaattattaattattgattatacatcatttctttaaaaatataaagcgatttcttattttttatcatatttttatataatcggttatctgcatagttacttgatttaaatcacctgcaatgttatgattattcaaaagaatttttagagggagaattaccatggataataaagaaaaggcactgaaatgccacgaagagtggaatggaaaacttgaaaccatcgccaaatcaaaggttaattcgagagaggaccttgcaattgcatacacccccggtgttgctgagccatgtaaggtcatagccgaggataaggaggctgcatacaaatacacctggaaggcaaataccgttgccgtagtgtcagacggaagtgctgtgcttggtcttggaaacatcggtccttacgctgccatgcctgtcatggagggtaaatgcgtacttttcaaggagtttggaaacgtaaacgctgttcctatctgtctcgacactcaggacactgaggagattattgctgcagtcaaaaatatcgcaccgggctttggcggaataaacttagaggatatttctgctccgcgctgctttgagattgaggagagacttaaagagatgctcgatattcctgtattccacgatgaccagcacggaactgcaatcgttgtactcgccggtatcatcaactctctgcgccttactggcaaaaagaaagaggactgcaaggttgttgtaaacggtgcaggctcagcaggtgttgccatcactaaacttcttctgacatacggctttacacatgtgaccatgtgtgaccgtctaggcatcataggaaaagactatccaaacctcaactggatgcagcagaaaatgacagaagttacaaaccttgaaaatgcaaagggtactctcgcagatgctttaaagggtgctgacatattcgtaggtgtttccgctccaaatatcgtcacagccgagatggtttcttctatgaacaaggactctatcctttttgccatggcaaatcctgttcctgagattatgcctgatgtggcaaaggctgcaggtgccaaagtggtcggtaccggaagaagtgatttccctaaccagataaacaacgtggttgcattccccggaatcttcaagggtgccttagaaggacgtgctacacagatcactgaggaaatgaagcttgctgccgcagaagcactggccggtcttgtttctgacgaagaattaaatgatgattttattatgcctgaggcatttgacccgcgtgttgccgctgttgtcagcgaagctgtaaagtcacatatttaatatgagatactattcactcaacagatactgccgcgatacattcggtgaaaagctttacaagctctctttagatggaggtatgacctgtccaaaccgtgatggcacactctcatcgcttggatgcctgtactgcagcgccggtggctccggtgattttgcggcggaccgcagcctttcaataaaggagcagctttctgccgctaaggaaaaggttgcttcaaagagcatctgtgagcactttatcgcatattttcaggcttttaccaacacatatgcgccggtagattatctgcggcgcatattttatgaggctatagaagatccatctgtcgctgtgctctccatcggcacaagaacagattgtttttctgctgaaatttataatctgctctcagaattaaacgaaataaagcccgtctgggttgaactgggccttcagaccattcaccggtctactcttgatgccatgaatacacatacatgtgttgaggatttcatcattgtaacggatgagcttagacgacgtggcataaaggttattgcacatctcatactcgggcttcctcatgagacacgcggcatgatgcttgaatcagttgattttgttgccaaaagcggtattttcggagttaagcttcagctgctgcatgtactaaagggcacaccactggctgatatgtatattaaacagccatttgagctttttacgctggatgattactgcgattttgtggtagactgtatagaaagacttccaaaggatatggttatccaccgcataaccggtgacggaccacgttctttacttgttgcacctctttggagcacagataaaaaacgggttctgaacacaatcaataaaagatttgaagtgcgagacacatatcagggacgattaaacttgttttaaaggagaaaatcatggctgagccatttaccatatataagctgacaattttatacatgctcgacaaagcgggctttccgctgtcaaacacacagatttccaatttctttttggaaaaagaatacaccgactacttccgtgtacaggaggtcatcggtgatttagtaaatgctgatttaattaattttgagtctactcattccaatacacagtacactctgactgctgccggaaaagaaactctcggtttcttcaaagacaagattaccgacggtattgagtccgatgtaaagagcttctttacggacaacaagctcgagttcagacaggaaaactccattcttgccgactattacaggacaactgaccgcaaatatgcagtacgttgtcaggtgcgctcagagagcaccaccatcatcgacctgactctctcagtcggcacaaaggagcaggccgaggccatctgcagcaactggaagaatcagaacgaggatgtgtacgcatacctcatggatatgctgcttcgatagattattttttagtttttcttacagagtagccgaagcttccgagcttatctccaaagccaaaatactctccgtgcgagtacatcacgaggccggtatcattgatatgaaatttcccggtcccgtccatgtatttatcatccactgtcacgccgacgacgtctgctataaacattgtatggctgccgagctcctcgctttttcttaccctgcactcaatatttaccgggctttgtgatattccgactgctgacacatgctgcatcgcaagcggtgtcagatgcagttctttaaatttatccacatccctgccgcttttcactccgcagtagtcgcaggctctaagcagcttctcggtggtcagatttaccacaaactctccggtttctttaatcatgttataagaaaagcgctccggccttacagatattgaaagcataggcggattagtgcacaccgtccccgcccatgccactgttattatattgttatttccggccttgtcagtgacactcaccatcacagccggcaccgggtttagcatattgcccggcttccagttttgttttcccatatgttaatttatcctttaatttttctttaatatcctttatatccactaattttcctttaggttttccatgctttctttaagccttgccaggtttgcatcctcaagctccgtgagcggcagacgaagtcctcccacatcatatcccaaaagcttcatagccgcctttacaggaatcggattcacctcacaaaacagtgcctctattaaatccaggtatttaagctggatatcaagtgctgatttaatatttccattcagatattccatcaccatgtcatgcactgcagccggcattacattagacagcactgatatcacaccgattccaccgagtgagagtattgggatgacctggtcatcgtttcccgaataaatatcgaggtcattttctgccagcttctttagctttgcaacctgcgatatattgccactagcttccttgattcctactatatttccaaaatccctgccaagccttgccgcagtctgtggaagtatattgcagcctgtgcgcgatggtacgttgtacataatgattggaagcccaaccgcccctgctatcgctgcatagtgcgcataaagaccattctgtgtggctttattgtagtaaggtgtgacaacaagcagaccgtctacaccaagcttttcaaccttctgtgaaaaatctatcacattttgtgtgcagttggcaccggttcccgctattacaggaatctgcccggctgtctcgtctaccacacattttattaccgaaagcttttcttcctctgtcattgtggcaggctcaccagtcgtgccacacacgataattgcatcagtgccaccgtctatctgccttctcaccagcgtcctaagcatttcatagtttacactgttatcctcattgaaaggagtaattagcgctactccggcgcccttaaacagaaacatatatacctcccaaatacactattttactgaactattttatactaaactatttaacctatactaaatattaaagtctgatgtcaggattttcttttattatatcagcaattaattctctctcatccatgtgatgcttcacaccctttatctcctgataatcctcatgtccctttcctgcaagtactatgatatcaccatccttggcattctccatgcagtatctgatagcctccttacggtcaggaattgtcacatactctccatctgccttgtgtacaccctgtaaaatatcattgattatgtccataggctcctcatctcttggattatcggatgtgacaacagtaaggtctgcaagtctcgatgacacctctcccatctcataacggcgtgactttgccctgtttccgccacagccaaacaggcatacaagtctgcccggctcatactccttaagagtggtgagaaggctttcaagtgccatcgcattgtgtgcataatcaatcataagggtatatctctttgtaacaggaacaatctctattctgccctttacactcacatgatgaagagcctccccgattgcctttttatccacattgaaatgatggcagatagcaatggctgttagtgagttgtatactgagaatttgcccggcacattgacctccacatcaaaatccagaagccctgatacatggtatttaatgccgagtgctccatgctcctttttaagctcaacattttctgctaccaggttgtttgtggacttgtagccgtaagtctccacctggcatgtgtgtcccttcataatcccctctaagtgctcatcatctccgttaaagataccaagcctgcactgtctgaataaaaggctcttgcaatgcatgtagtctgcaaaatccttgtgctcatgctctccgatgtggtcaggctcaagatttgtaaatacaccaatatcaaaggtaaagcccgatactctgtgaagcatgagagcctgtgatgacacttccataacaactgcatcaaggccttcgtccaccatctccttaaacagctcctgaactctgtatgactcaggtgtggtatttgctgacggaattctcttgtcaccacatatagactctattgtaccgataagtcctgtctttatgccggctgactcaagaattgactttaccatatatgtggtagtggtcttaccttttgtacctgtaataccaatagtctttattttctcggccggataatcaaaataagctgctgacatacacgcaagtgcaagccttgtatcatctaccttaatatatgtcactccttcgataggagtcacatctttttcgacaaccactgccgctgcacctttctttaccacatcagggataaaatcatgtgcatctgacacagctcccgatatgcacacaaataccgatgccttctccaccttgcgcgagtcatacacgagtgtggaaatctctatatctgtgcttcctgctaatactttataatccattctttcaagtaatttttcaagcttcattttattttctcccatattttattatatttttgatatatattttctgttaattttgtttcttaaagatttgtaactattcaaccacagacattcaccaaaccgcacaatacttgtgctttatatgatatcaatttctcctgagaaaacctcagtagcaggtcccgtcataaacacatgattggtctttggtatatactcgatagtcagatctccgcctcttagatgcacaagcaccttgttgtcagtctttttgttgagtatacatgccatgacggtcgcacaggttcctgtaccgcaggcccaggtctcagcgctgcccctctcccatactctcattttcgcctcattccttgaaagtatctctacaaactccgtgttggtgcgctttggaaacatcttatgattctcaaaaagagggccgtatttctcaagctcaaaacctgccacatcatcgacaaacactaccgcatgagggtttcccattgaaacacaggtcatgtgccactctctattgcctgctgaaatcggttcatctattaccctgtagtcatcaccataagcacttccgtctgctttcacaaccggaatgtccccaggcgtcagaataggctcacccatatccacgcgcacctgtgataccttattttcctcaacatatagtgtaagatacttgatgccagctcctgtctcaaccgatatttcagtcttgtctgtaagcttgtggtcatacacgtatttcgccacgcagcgtatgccgtttccgcacatctcggcttccgaaccgtctgcattatatatcctcattctaaaatctgccttgtcagacggacctattgtgattagtccatctgagcctattccaaaatgcctgtcactgacatatattgacacccttgccgggtcatccaacttctcctcaaaaaggtttacatatacataatcatttccacagccgtgcatttttgtaaatttcatagtgatcacctcgttattggttttatattgttaactatattatacagcgcactttcttgtttttctatagcattttgtgcgttttatgttgcgttttgtgctgttatagattatgcttatagtaacatcttattatcaaaggagcatatcatggattcaaattatacaaaagcaggctacctgacggagccttttaaaatatttcatctaagagatgaacacaagctaaatatagatttccattaccatgatttccacaaaattctgattcatctgcacggcaatgtatcctactgcattgagggccgaagctatgagctcaaagaacatgatatcgtgcttgtcaatgccggcgaggttcataagccaatattaaatgacgattcaatttatgaaagaatcattatatatgtatcacagcagcttattgacgattatgtgagcaaaggctatgatctggcatgctgtttcaagcaggcctatgctaaccagtcacatgtactaagactcgctgcgaccaagggcagtcgtctggctgatacaatcaagggactagactctacacttagagaaaccactgaatacgcaaatgagctgtaccagaagctcctgtttttagagtttctgatacagctcaatcgtatcaccctgcatggcggtatcgaatatattaacacattttcctcaaacaaaaaaattgtagagattttagatttcttaaataagaatttaacaaaccgtataagtattgatgaactggcagataaattctatatgagcaggtatcacctgatgcacaccttcaaggaagaaaccggctgcaccataggttcatatatcacaacaaagcgtctgctgctcgcccgcgatatgattcgcgacggaagcagtgtgtctgccgcctgcgatgcctgtggattcggaagctattcctcatttatccgtgcataccgcaagcaattccattctacccctacaaatacataaaagcttcacgatatatcacaggaagcttttaattatttttaatgctgctatctctcattaatcacatttataagctcaggtatgagctgcttcttacgcgacactactcccttaagcataattccatccttactctgtggcagattgtatgctgaagctgctattgatgctgcctctgcaccactgtagatgagatatgtggactcattaagtatatccgtgagcataacaaagagcatatcaagctgtttttccacctgcatcttgtcaagcagaggcaccactcttgcctgtaccttatcgagctctgttctcgaaagagcagaaatctgcgatactccaaatgtataatcccctgaatgaaagattttaaaatcctgatttaatatttcctcttctgtcttgttagcaaagttactgcctgcctcgaacattttctgggcaaactcttctacatctatctgcgcaatctccgccaggataagtgctgtagatttgtcaacctgggtacatgtaggcgaacggaacactagtgtgtcagagagtattgcagcgcacataagccccgccatctgaggagtaacctccacacctttttccatatacatctgatagatgatggttccggtacatccaagcggctgatttctgaaatacacaggtcctattgtctcaagagaaccaattcgatgatgatcaattatctcaagaatctcagcctcatcaatgttggccactgcctgtgaggtctcattatgatccacaagtatcacctgttttttccttgcattcattaaatttctgcgtgaaaacatacccacataattttggttttcgtcaagtattgggaaatccctgtgtcggatttttgaaacagtatcacgcacatcatccacataatcatccaaatcaaaatgaataagattttcccttgtcataaatgactttatcggcatactctggtttatcagacgcgatgtggtaaacgtgtcatatggtgtacttatcactaccacgtccttagcgtttgcagcatttatgacatccttcgatatatcgaagccgcttgtcacaatgatacagctgcagtttgcctcaatacatataagctgtgactcttcacggtctgatatgatgaccagatcatcctcagccacatttccctttatggtatcaggtgtacctgctgcaactataacctttcctttcacaaaatagccatgctcattgcctgcaactatcttgccatccagcgtctctataatatttctgtactgggtcctcgcctttgccaggatagaattgtcatacacatccatatatgactttgctatatcacctgtcacaataagcccttcaagcttgtccttcttattgacaaccggaagagtgactacgttgagtatcttcatcatctcccatgcctttttcatggatagattactgctgacaccctcagtccttctgatatgtatatcctttatctgtgtgccaacatcctttaaaagggcaggcgtatctgccttaaaataatccagcacaaatgctgtctctgcactgatgctgcctgctctcattggtatgtattccattgtatcgtctgtatgtgatttaaggtttgcatacgctattgctgcacagatagaatctgtgtcaggatttttatgtccaacaactcttacaatcttttttgccatttagtcttcctctctgtctgccttataaaatgtcaaaatatggtgcaactccctgactgggaactgcaccaccctattacaataatatttattaaaaaatcgaaccaaagaaccccaatatatacaatgcgattgcaacaaaaccaaatgtattgataatagccagcacagtagagatgactgcaaaagtctttgttgttcctacctgcttctcaagctctgacactgtgtccaccttgtctcccattaccttaaagagatcctgaatattcctgaagcacttaacattctctgtatgtaccttgtcagacagctccgcctttaacgaaacaagctgatcattaagctctgtaagcgactgaagcatatgggcattcgcctcatttaccgctgatgtaactgctgctgtgccctcctctgtgatacgccttgtctgctctaatgtgtcaccaaaatcaagactctgacctatattctggctgatgcctgatatctcagtgccaagtgactgtccgagatttccaatctgtccggacatcgaactaccaagattgtccatattggcatttaccgagcgtccaagattatccatatctgagcttacctgacggcctaagctgtccatgcctgcattcatagattgctctatctcagccatcttttcatgaacactttctataagcacatctatctgcttagcaacctgtgcagtgattccatcggctttttcctgtctctcgtcaagtatctgctgcagctcctctgccttagcttccctctcctcaactatggttgaaagctcctctgcttttgattctttcgtattgagcatctcctgaagacgttttgccttttcacgaaactcatcaatttgtgttaacaaaaaatcatctttatccatttgtatattatcctcttttttctgcactctttcactacggttaacatcgtctcttgctacacgggatgccattactgttcttgaaggtactgcccgctccgcttgttctgtcgatataaatctttttgcacgtctatcaaatatgcctgacattcgtattcctccgatggttcaattaaataccattaacatatatattgtaccattacatattgtatttgtaaataaaaaaaccacgaaatatagtgtaatcacagaagaaaaagcaaaaatcccacagggcatttgccctgtgggataaaatatataccgtgactaatgaattagtcctctccgtataatttaacgagtttctcaaggtgtgtataacgtgccttagctgtctcctcagacttagcaaagagtttctctgctctctctgggaatggcttgataagacgagtataacgtgcctcgttgttaaggaactcctggtaagatccgtcgccggcctttgatgtaagtgtgaatggattctttccttcagccttgagtgcagggttgaatgagaagaggttccagtatccagccttaacagccttcttcatctcatcctggcagtggttcataccacccttagcgataccgtgaagctcgcaaggtgcgtatccgatgatgagtgatggtcccggataagcctcagcctctgtgatagccttaacagcctgtgctgggtttgctccaagagcgatctgtgcaacgtatacatatccgtagctcatagcgatctctgaaagtgacttcttgcttgtctctttaccggctgctgcgaactgacatacctcaccgatgttagaagccttagaagcctgtccacctgtgttagagtacatctctgtatcgaataccattacgtttacgttctcaccagaagcaagtacatggtctaatccaccgaaaccgatatcatatgcccatccgtcaccaccgaagatccatacagatttctttccgaggtaatccttcttagcaagtacttctttagatttctcacatccggctgctgctgccttctctaactctgcaataagagcggttgttggctcaacatttgcctttgtgtcatcctttgtctcaaggaacttatctgctgctgccttgaactcagctgtagccttgtctgatgcagcgatctctttaacaagctcgatagcctggtcacggagatatctctgtccaacttccatacctaaaccatgctcagcattatcctcgaagagtgagttagaccaagctggtcccttcttagagttgatatttactgtgtatggtgatgtagctgccgggttaccccagatagaagaacatcctgttgcgttagagatgtacatctgctcaccgaagagctgtgtaataagtctagcgtaagatgtctcagcacatcctgcacatgagcctgagaactcaaggagtggctggttgaactgtgatcccttaggtgttgtatcaaccattccggcatctgtcttcttagaaacgttagctactaagtaatcaaatactggctgctctgctgcctgagactcctgtggctgcattgagatagctgctgtaggacaaactgtgatacactcaccacatcccatacagtcaagtggagatacgctcattgtatacttgtaagcgcctgcctttggcttcatatcagcaaccttcatgttgtcaggcgctgcctttacttcgtcatctgtaagtaagaatggacgaattgtagcgtgagaacatacaaatgcacagttgttacactggatacacttctctggatcccactgtggaactgtaacggctgttcctctcttctcgtatgcagaagcacctgttacatactgtccgtctgccttgtcagcgaatgctgaaaccggaaggctgtctccatccatcttagcgattggatcaagaagctcgttaacaagcttaacaacctctggacgtcctgtgcgctctgccttaggagcatctgcctctggattcttccaagactcaggaacctctaccttatgtacagcgtcaacaccagcatcgatagccttgtagttcatctctactactgcatcacccttctttgagtatgacttcttagcagcagccttcatgtactctacagccttatcgataggcattacgtcagcaagcttgaagaatgcagactggagaattgtgttagttctcttacccattccgatctcgatagccttgtcgatagcgttgattgtgtaaagctgaatgttgttgtcagcgatatatttcttagcgtcagcgttgaggtgatgagcaagctcttcatctgaccactggcagttgatcatgaatactccgcctggcttaacatcctgaaccatcttcatgtcctggataacatatgcagggttgtggcatgctacgaagtctgcctggttgatgtagtatgggcttctgattgggttgtcaccaaatctcaagtgagaaattgtaacaccaccagtcttctttgaatcatactggaagtatgcctggatgtatttgtctgtgtggtcaccgatgatctttgtagagttcttgttagcacctacagtaccatctccgccgagaccccagaacttgcactcttttgtaccaggtgcagatgtgataggagctggcttaacctctggaagtgaaagatttgtaacatcatccacgattccaattgtaaatctgtgcttaggagcatccttctcaagctctgtatatacagcaaatactgaagaaggtggtgtatccttagatcctaatccgtaacgtccgcctactaatacaacatcgttcattcctgcttcacgaagtgttgtagcaacgtctaagtataatggctcaccaagtgatcccggctcttttgtacggtctaatacagcgatcttctttgctgtctttggaatagcattaagaagagcctctgaagaccatggacggtaaagacgtaccttaataagtccgactttctctccctttgctgttaagtaatcaattacttcctcagctacatcattgatagaacccatagcgatgattacacgatctgcgtcaggtgctccgtagtagttgaataatttgtaatctgtaccaagcttagcattaaccttgtccatgtacttctcaacaactgctggaagctcatcatagaacttgttacatgcctctctatgctggaagaagatatctccgttctcgtgtgatccacgagctgctggatgctctgggttaagagcgtgtgctctgaattctgcaactgcatccattggacacatctctttgagatcttcataatcccacttctcgatcttctgaatctcatgagaagtacggaatccatcgaagaagttgatgaatggaacctttccctcaagtgctgcacagtgtgcaaccggtgaaagatccataacctcctgtggatttgtctcacaaagcattgcgaaaccagtctgacgacaagcatatacatcactgtgatcaccgaagatattcagtgcatgtgaagatactgtacgagctgatacgtcaaatacgcaaggaagattctcacctgcgattttgtacatattagggatcataagtaaaagtccctgtgaagctgtaaatgttgtagtaagtgcaccagctgcaagagatccgtgaactgtaccagcggcacctgcctcagactccatctcaactacctttacagtgcttccgaaaatgttcttctgtcctgctgctgaccactgatcaactgtatcagccattgggctagaaggtgtgataggatagattccggcaacctctgtgtaggcatatgctacatgagcggcagcggtatttccatccatcgactgttttgctctagacatgatatttcctcctgtaaaataaatgttcaattatagacatgaatcagaatgtctctacataatagtttagtttgtgcgctgcaaaaaatcaagtttttttagcaatacattgtacaaaaaccctaaaatatttattaacaaggtaaaatttatgtacaaaagggcacaatggctataaatcgcctgtaaaacacttgcaaaatactggttttacgttaaaatagaaacgatgtgttacagaaacgaacaggttattaaataggaaaggattgaataaagacaaaatgattagtgcaaacaatattacattaagaattggtaaaaaagctttatttgaggatgtcaacataaaattcacagagggaaactgctacggacttattggtgcaaacggtgccggcaagtctacatttttaaagattctctcaggacagcttgagcctacaagcggtgatatcgcaatcactccgggacagagactgtcattcttacagcaggatcacttcaagtacgatgagtttacagtacttgatacggttatcatgggtaataagcgtctctatgatatcatgaaggaaaaggaagccatctatatgaaggaggatttctcagacgaggacggaatccgtgccagcgagcttgaggctgagtttgccgatatggacggctggaatgctgagtcggatgcagctactctcttaaacggtctcggtgtacctactgatgatcactacactctgatggcagatctgccgggtgcagtaaaggtcaaggtgcttctcgctcaggcactgtttggaaatcctgacatactgcttctcgatgagcctaccaaccacttagacctcgatgccatctcatggcttgaggaattcctcatcaatttcgagaacacggtcatcgttgtatcccatgacagatacttcctcaacaaggtctgcacgaacatcgccgacatggattacggtaagatccagctctacgcaggaaactatgatttctggtatgaatcaagccagcttattgtccgtcagatgaaggaagcaaacaaaaagaaagaggaaaaaatcaaggagctgcaggaatttatccagcgtttctctgccaatgcctctaaatcaaagcaggctacatcaagaaagcgtgccctcgaaaaaatccagcttgatgaaatacgtccatcaagccgtaaatacccatacattgatttccgtcctgagcgtgaaatcggaaacgatgtgctctttgtcgagggtatttcaaaaaccatcgacggtgtaaaggtacttgacaatatctcattcactgtcaaccacgatgacaaaattgcatttgtcggaggaaacgagcttgcaaaaacaactatgtttaaaatccttgccggagagcttgagcctgacgagggctcatataaatggggtgtcacaaccagccagtcatactttccaaaggacaataccacaatctttgatactgatgagctaatcgtcgactggctcacacagtactcagaaatcaaggacgccacatatgtgcgaggtttccttggccgtatgctctttgccggtgaggatggagtaaagaaaatgcgtgtactctccggaggagaaaaggttcgtgtactgctctcccgcatgatgatcatgggaagcaatgtactcatgttcgatgagcctacagaccacctcgacatggagtcaataacagcattaaacaacggaatgataaaattcccgggagtaatcctctttgcctgccgtgaccaccaggtagtccagacaaccgccaaccgaatcatagaattcctgccaaacggttcaatgatcgacaagatcacaacctacgacgaatatcttgatagcgatgagatggcacgtaagcgtcaggtctactcaatgagcgaggacgatgaaaaagacaactaaacgctaattaattaaaaagaagcatcccaatccgggatgcttcttttattaagccgtaaagtaaggtgggtgattccctgcctgtctttgactataaaaacatattataattatatccactgttataggcctgtgtataccttccattggcgccatacgtgttagtcttttctgcctcattctttgcggcatactcaagcattgaagccttgcttgccactgcgtaagcataagagccattccccttaaaaagtgcatcaaccttagtcgaatcagcctttttaaatgtatcctcgtcaacagacagcttgccggacttggaatccactgtgattcccaccttcgcaagcgactttgaattgatatctgtaagtgacttcatagactcaagatttctcgaaatctgctttgtctcggaatcatccgcagcattaatgaggctgttgtaatcagacacaaaagctgacaccttcttgtacgtagcatctgtatcgtccttgcggctgtttttgtaaagagcctgcgccgactttaccatgtcctctgactccgactcaatggacgcaagtgtcttcgctgaatccttagatgtagaaacagatgatgagacaagagactgggcctttgaattaaggttatttccataatatgacttgagaagcttaaaatagctgccacttctaatgccgctatatgtagtcatatccatgtttgcaataaaagacgatgctgcattgctgcttctactgctgctaaagccggaaaacagtgtggatatggatgacgaatcccacattccaattcctctcatagtatcactcctttgataatcatgtaatccgttactttctatatatctttaatatagacgcttttccaatctatgtcaagataatatctgccggtatcgcccagcccggtattactaacatatgagctggtattgtcgtcctttatatatcctctatctgccaatctatcggctccactccatgtttctttaaaaactcattggcctgactaaaatgcttgcatccaaaaaagcctctgtaagccgacagcgggcttggatgcggtgctgtcaatatcagatgctttggatttgtaagcataggaatctttgattgcgccggacgtccccagagcatatatactataggtctgtcctgctcatttacagcctctatgattgcatccgtgaacttctcccagccgtgcccctgatgcgagtttgcctgatgagccctgacagtgagcaccgtatttaaaagtaaaacaccctgatcagcccatttcttcagatatccattattcgggatatcacaccctaaatcgtcgtgcagttccttgtagatattctgcagtgatggcggaatatccttctgagacggaagcactgaaaacgacaatccatgcgcctgattgacattgtggtacggatcctgtccgaggatgagcaccttcaccttgtcaagtggcgtaaaatgcatggcattaaatatgtcatctgccggaggatataccacatgtgtggcatattcatctctcacaaaattgtacaaatccctgtaatacggttttttaaactcggctcccacagcctttgcccactcgccgtcaagcatactcataatctcaatctaccgcctatcttctgaccgacacacctttatctgccagataattctttaaatccataatttcaagctccttgtagtggaaaagtgaagctgcaagcgctgcgtccgcttttccttctgtcagagcctcgtaaaaatgctcctttgtgcctgcaccgcccgatgcgataaccggaacagaaacattatcggcaataagccttgtaagctcgatatcgtagccatcctttgtgccgtcacaatccatgcttgtaagaagtatctctcctgctccaagctcatttgccttaacagcccactcaatggcatcaagacctgtatctatgcgtcctccgttcttgtatacattccagccgcttccatcagcacgacgtcttgcatcgattgccacaaccacacactgactgccaaacttgtcagccgcatcacttatgagccgaggggtatttatagcacttgaatttattgaaatcttgtccgcaccctctctaagcagtgccttaaaatcatcgactgttctgatgccaccgcccaccgtgaacggtataaacaccttttcagcgacctttctgaccatatccacaacagtatttctgttgtcgcttgacgccgtaatatccagaaaaaccacctcatctgcacctgccttatcataagcagccgcaatctcaaccgggtcacctgcatctcttaaattgacaaagtttatgcccttcacaacacgtccgttattcacatccagacatgggattattctcttcgtaaacatattatgcctcacctatccctgcaaaatttttaagtattgaaagtccgactgtgctgctcttttccggatggaactggcaggcgaacacattgtttttctctacagacgcatgaatgtgtgtgctgtactctgtcgttgctgtgacaattgcttcatcagcggctttcagatagtacgaatgcacaaaatatacatacggatgctctgaaagacctttaaacagccttccattgttctgtaaatcaagtgaattccagcctatgtgaggtattttaagtccttccttatctggtatgcgaagtatctgtccgtcaagcacatgaagcccctcaacgccctgactctcatcgcttccctcaaataatagctgaagtcccaggcatatgccaagaaatggcttgtccatgtcacaaacctcgtgaatcaccttgtccagctcgtattttttaagcgaattcattgcatctccaaaagctccgactccgggaagtattaccttatcggcatttaaaatctcatgcctgtctctggtcacaatactctcctcgcctatagctgtaagagccttttccacacttcgcaggttgcctgctccataatcgatgattgcaatcatatcattttgtctcctctttaatgcctaattcatttaatttctgtgtcagtgccagtgtatagtcatctctatcatctatattatatagagcaatggcatcatcatatgataagccatactgactgctcagggtatcagaaataatgtttttaagctgctcaagctgcagctcacatccgtattcctttgcattgtctgcatttacagcacatcgtcctgccgcacatactaaggaatccgctgccatggttacatagcctgaatcgctaaagctcttataggcatcatacttacctgacactgatgcaagcaccgacagcttattgtacaactgcttatcgtcacccgaaagcttcaagccgctcagcctgctgtaggcctttgtatacagttctattgaatcagctttattctgtcccagatcagctattgcctgattgtacgtattctgagcatcagtcactttggagttgtttccgagcaaaaaggtgcatatgagaacaaacacaactatcgacataacaaatacccagattactataacaggtcccttaggaagcttaggtcccttctcccatccaatgcgttccttcttttcctttggagcctttggctttttttcttttttaggtttttttggcttcttttcttttttaggctttttgcccttctttggcttatctgtggcttcgtttagctctccgtcagcatccagcgcttcaagtatctgcttattctcatctgagagtgtctttgcgtcagtttctgcaccttctgctgtgctctgtatatctgtgacatcatctgactgcggctcttttgtaaaaaatgatattattctttttaaaaggctctttttttcagtatcttgtgcatcaactgctgcatcagccgtctcgtgcactttcatctggctgcttgcataatcatctatatcagcccctgtctcaccggtttttccttcaagcagatcaccgatattatccagaccatcactacccagtatgtcaagtatatcctttgatgcatttcctgccaaatccggctctcctatttcttcaaccatctgaggttcatttgttattatactctccggagtctcctcctgtttgggattctcagccatttccggcatgtttgcatccatcatctctatcccagaatctgccggtgtaaaattaaataccgcatcgcttagattattgtctgctttgttttcctgtttatctccctgagtctcctgttccttcatcctgcggtcaaactcagtgagcatatcatcaagtgaagcatccttgtcatcaggagccggagtctgtacattaagagcctgacccttggcctgctcattttccctctcaagttccttttcaaagttcgacagatactcatcatatgtctcattttcaagctcgtcctcaaactttttgaggaattcatcctgatcagccccagacatcttcgtatctgtatcctgcagcttattcattgaatccagcaaattgtccagatagttttctgtcgatttatcgctcattagtattctccatctataatccattaaagggtgcagctaaacaagccacaccccttgtatctaaatatattatgctttatcaatcagcttgtcaatcgcctctacaagctttccgatttcaggctttgtaagctgtgcgtctgctccaagctgttcaccctttttcctcatctcttcatttaccagtgaagagaatatgataaccggtatatctctaagctctgcatctgattttacaagctttgtgagtctgtgtccatccatgagtggcatctcaatatcagttataatgcagtcaagatgctttgtaatatcgccctttgcctgcatagcctctatcacatcccaggcctcctgaccattctcttccactatgagattggtatatcccgacttcttaaggcactcggtgatgagctttgacaataaagccgaatcctctgcgataagaattgtagcatcactcctatctcttgcctccatctcatcgatatcattaaccctaagtcctgtctgtggactaatagaagcaactatagcctcaaaatcaaggataactataagcctgtcatccattttgataacacctgtagcagtgctgccatgctcgcccgtcagtgtctcgtcaggctttatgatattctcccacgatacgcggtgtataccgataacctgatctacatgaaatgccacattgagtttgttaaaattcgtaatgataaataagcctttttcatccgtctgtggcagattaagacaattctttaaattgataaccgtaatcattgtgtcacgtggcataaatattccctcaacactcggatgagtattcggaacaggagtgaccggcatatattgcaaaatctctctgatctttgcgacattgattccgtagtgattgtctcccaacgtgaattcaagcacttcaagctcgtttgttcctgactccaataatatgttcgtatccataatacaacctccacctcttagtaatctaagtatatcatatgttttataattcaatcaaacttttttcgttatcttttataaccgacatcttgatattgtcacatgccgtaccctgaggtatcttgaaaagcagcaccacatcaaccgcatcgtgcgcctttacggttccctgaaaagtattaagggaatatgtaaggaatgtgccctcagccgtgtattcctttccatcggggaaagtggctttatatgtcctggcattgccaaacatatcaacatttatatcctcgtctgtcggatttttaagagtgaatttcataaccgcaaaagtattaccgcttcctgccgttatagaatagtatgagccctcattgtacacatctgactcgtttactccatcatatgtaatttcaaggctgccgtagcctgttgcctcggcaagtgacaccttcttttcctgcgtggcagaaggctctttctgcgaattgctgctcttatcatttccagcttcagatgtcttattatcctgcgaaagtgaattatcaggtgacgcctcgtccactttctcagtgtcgtcagcatcctccatatccccacgtttctccgtagcgttagtcatgccatcctgctggtatatattgtgttttgcaacaacatatgctgaataattagcgataaggccttgttccgcatcagtcatatcatataattttgttccgcagcctgtcaacgttataattgctgtaaatgccacagctgccatttttatatttcttcccatcattgcaataaacccattcttattctatgacttttatcctaataatacatatagtaacacatttattgattgtttgcaataaataactcaagttcaaaccagaattctacaccatccttgtgatttatgacaccataccctctgtgatgcagttccataatggcctttactatagacagtcctatgccgcttccgccatattcccttgttctggccttgtccaccttataaaacttattccatatattttctatatccttatcaggtatcggctctcccgtgttaaacacgctgaccctcacacggtcgctgtacatgctgtatgatacagtgatagtaccacctcttgtgcagtgatttatcgcattgctgatatagtttgtcacaacctcttcaatcttgtatatatcaccgctcacatatacggaatcggtgcggtcaaactcaattgcagcctcatttttctgtgccagaagcctagatgaatctataacccctctgacaagtggtgtcagatcaaacctcgtcatctcaagcacatcactgccatcctccagatgattgagagataaaagcttcataaccatgcggttcatcttgtcagtctcgtccatgatgacatcacagtagaagttacggctctcatcatcgtcatttacgacctctttgagtccctcagcatagcctgagatcagagcaagcggagtttttaactcatgtgacacatttgacaaaaactcctttctcatctcatcaatctcttcttttttctttatatcacgctgtaattcattgtttgccacctttagtcttgtgattgtctgctcaagtgtctgcgacagctcattcatatgctcaccaagcacataaagctcctttgcactgttttccgtatcaatgtacttcgcatcaaaatcaagcttcgccatccttgtcgacagctcagtcatatttcttatcggcctggtcatgttgcgagcaacaatatatgccataaacactcccacaacaatagcagccactgtgcctattgcaaaaaagcggttcgatatggacacgctctccttaatgctctcaagcggtgtcttcatgtatacaaagttaccgtcaatcagtctgttatttatgatgatatactctgtccccagccttttatccttctgccttgtcatattcaggttgttgtagtctgccgaatacgacgacatgcttgcctccaaaagcagctggaatatttcctgattgtcagtggttccctcaatgatgaccttaccgtatttgttgaacacaaccgcatctatattggcgccaacgcatttcttttcaaatgctacagcaaacgtatcatctgaaagtttatcattttttgcagccaggtccaccattttgtataccgcaagcatctctttttccttgttatatacataatacttttccagcagtgtgttattagccatccagaacacgcctactatcagaagtacaatgaatgaaatcacaaacgtaagctgcgtggatagcgtttttttctttttcatggtgacacctcttatcccgaatccattagtcctaagcttaacacttactgtatctcgaacttatatcccacaccccagacagtctttatatagtcgcctttagcacccatcttgcttcttaatttcttcacatgtgtatcaatagtcctcgcatcgccaaaataatcatagctccacacactgtcaagtatgcgctccctggtaagagcaatcccctgattgctcataaagtaatccaaaagctcaaattcctttaccgaaagttcaatattcctgccatcaatagctacagtgtgcgccgtcttgtccataacaataccaccggcctcgcttattactgcctccttgcccagtttattcgccctgcgaaggagagcatttaccctggccaccagtatctttggagaaaatggctttgaaatgtactcatcagcaccaatgtcaaagccgtttaattcatcacgctcatcgcccttagctgtaagcataataatcggcacctttgaagtctgtctgatttcacggcatacctcaaagccatttatccttggcatcattatatcgagcaccagcagtgctatgtccttctgctgataaaatatatcaagtgcctcctcgccgtctccggcctcaagtacctcgtacccttcccttgcaaggaaatcatgcacgagctttctcatcctgctctcgtcatctaccaccagtatctttattttgtccactctgttgcatcctgcctttcatccagtgctttttccctctcttctactgctttttcccttttttcaagctccttctgccagttttcatatttgtctatcagctcattctcgtagtccaccacatacggactgtgtccactcacatatgtgatgccaaacatagttactatggcagccgataatacaatagtaaaaaacaatgccacatggaactttttcttatagccttccgtctgtttttttacctcgacaaccgcttttttatcctcaggaatataaatcggacggatatcctcattcttgatatatgggattgtatgcagatattcctgcagttcaacaagaaacgatagccctacaggagtaaaaaaataccccggcttgttaagccttaaatacagcttgtataccgtatccgggtcagacatatcagtctgatcctttatatatcgtattccgtcactttcttttttagcctgccttgcctcttcctttgtctgaaactcaaacccatcaactacatacatcatattccctctttctaatcatcgcgctctgcaatctcacccgaacgatatgccgcaatgagatgctttagatcagctatcttttccttcatctttattccggcatccgtatctccgacaagtattctcttatcaagtacctctacagcctcacgccttgatacgatatccctctcatcccttactgccgtctccggtgattcaaacggctcatgtgctgtcaatgtcagcccatatgaattgtaaatcagggtatatcccgcgatgcctgtccgcctgcggtacgcctttgaaaaaccaccatctatgactatcactctgccgtcgcacttcacagggctttcacctcttaatctgtgcacaggaacatgtccgtttatgatatggtctcttttatcatgcaaaccaaactcctcgagtatacgctgcgcacactcaggcttgtttatatactcataataaaagtttttcttttctattttcatatcatcgtcatctataaaatatctctcaaacgtagccatcttatttctgccataaagcggagaatatggtgctgtccatatgtaccacatgatatcgctgcccttttgtctttccagcctgtcgtccgagaaaaaagcctttctgacgtaagtctccagtatatcaaacaaagccttgccactatactctttaccgtagatatttacctttgcgaagcttccatcctcctccatggggatgcatccgtggaaaagcagattgccattatataccttgtacatgctgcctcttttaagcagcagcccaacgtggtttttaagcttctcgcaatgaataaacgagctcctgagcctctgtatgacttcctcttccccctctgtcagcctgtaaggatcagccgggtcaattgttggaaagcttgtatcaagcagcttataagttctgccctcaagatctatagtgccctgttcataatcaatatgttccaaaagcaatcgttccttcatgccatactcaggccacttcttaatgagctgtccctccagcttgaaacgtatgatggcaatggccttgtgcatcttctttatcagatcactctccatattatctgcgccacttggagccaccttaaacacaaatctggtgcatgggtcatccttgtaagccttcagtgcaaacgtagcaagcggaagcatatttatgccatagccctcctcgaccacgtccagattaccatatctgatactgtttctgacaacagttgcaatacatgcaggatttcctgcggctgcccccatccagataatatcgtgattgccccactgtatatccagcgagtgatatctgcacagcctgtccattatcagatgcggccccgctcccctgtcgtatatatcaccaagcacatgcagatggtcaacagcaagtctctgaataagctctgaaagcaccactataaactcctccgcagtacccagctccactgttgtattgatgattgactcgtagtaagcctccttgtttaacacctccggcttttctgtgatgagctcctctataacatatgcatactcctccggcaaagcttttctcaccttggagcgcgtatactttgacgaaacggtcttgcacacctctatcagcttataaagagtcgtcttataccacgagtccatatccggctcgtcctgcttaataagctccatcttttcccttgggtagtagatgagtgtggcaagcgcagccttgtcagccttgtccatcgccagaccaaatacatcatctatcttctttcttacagccccagaaccatttttcagcacatgggaaaaggcttcatactcaccatgcacatcagatacaaagtgctctgtgccctttggcaggtttaaaatagcctgcagattgataatctcagatgatgccttgcctattgtcggatacatctccgacaactgttccaaataatgtaagtgttctttatcaattgctatatcattcatttatatctagacctcataatactgattcatcaccttatttatttccttttcaagcttacaacccgtgtatacacacttcataatgcactttctgattggctcctcaaaattagtaccctcgcacttatccaaaactccctgcaatgtaagctgtacaagtatgctctcacctgtctgcggatctgtggctatgttttcgtacaccttcttgtagtacttatcactcactaccgggtagtcagtaagcgccatttcccgccactttctaaaacttagcgacatatattcacctgctcttttgtatataataaaacattgtaccaattagcggtgctctaatcaatgcctcagacacatttatttcaaaaaagttttttgatatttattataaataaagctgcatttgtttaaataaaaaaagtgtaagctgcattcagcttacactaattaagtttcaggacacctccctttttatataacaaacattctaatttgacagtaattgacgtttcttatatatttatttatgtttcaacaataaccattatagtgtattgcgcatgtcaatacttgaccaaatttggagtttatttttttaaaaagaagggagattagctcataaatgaaccgacttgaaatagtaaataacatatcgacaaatattgagcgcgaacgcataaagcttggtatgtcccaggcacagtttgcaaaagcacttgatatgtcactctccacctacaagcggatagcaaacggagaatcctctcgtatagacgtctacaccgcttacctgatatacaagctgacaggacggttttcctgcgaactaacaggcttcaatgatgatgtaataaaccttgtaaagcgcatcaaaaagctttccaaaagccagcgcatacttatagactcgattatagacactgagcttgcgctatctgcctacaaggatgaaagctgtcatacggaggatctgatttccgtcctcatcccgacaggcaatatgaccgacggcatgattttggactcctacaatgtcgaaaagcttgatgtttcaaattacaggaaagccttcggtgatgcccttcacatcggaatccgcatcacaagcaatcatctacatcctgtatataataaaggcgatatacttctaatcagtcgaaacccaatccgcgacggcgataccggtatctttatcaacgcacagaacaagcgtgcatacatcagaaaactgcatcagaaaaacccatgtgagctcacaccaatcaacaattacggtgagaccttttatgtcgacagcgataatgttgatgatatgagcaaatggataaaattcggacacgtgctctgcaaggtgcgctagcagattactctgttattttaatatcatcaaagcagtcaaaggttgcaaagtagtctgccggagtttctgctcttctgatgagttttgcctctccattgctttcgagcaatatctctgctgagcgaagtcgtccgttgtaattgtagcccattgaaaagccgtgtgctcctgtatcatggattaccagatagtctcccatatcaatcttcggaagctgtctgtcaattgcaaacttgtcacagttctcacagagtgagcctaccacatcatatgtatggtcacaaggtgcatcctccttgccgagcactgtgatatgatggtatgagccgtaaatagccggtctcataaggtttgccgcacacgcatctactcctatatactccttgtagatatgcttctcatggatagcctttgtcacaagacagccatacggagccatcataaaacgtcccatctctgtgtaaatagccacatcgcccattcctgccggtaccaaaacctcatcgtacaccttatgtacaccggcgccgataactgatatatcgtttggtgtctgatccggcttataagccacgccaactccacctgaaagatttacaaatctaatatcgcagccggtctcatttttaagctcaacaaccagctcaaaaagctcctttgcaagctgtggataatactcgttggttactgtattgcttgccaggaatgcatgcacgccaaagtatttagcgccttttgacttaagaattttgaatgcctcaaaaagctgttcctttgtcattccatacttggagtctcccggattgtccatgataccgtttgacagtgtgaacactccacccggattatatctgcagcttattgtctccggaatatgtccgattgtttcctccaaaaaatcaatatgtgtgaaatcatcgagattgatgatagcaccaagcttgtctgcatatgcaaattcctctgccggtgtatcatttgatgaaaacatgatatgttctccgtcgaagccacatgactttgcaagcataagctctgtgtatgatgagcagtcacagcccatgtcataatcctttaaaatcttgagcagatatgggtttggggtagcttttacagcaaaatactctctaaaacccggattccatgcaaatgcatcttttacagcctgcgcgttggcacggatgccagcctcgtcatataaatgaaatggtgtagggaattttttaacaatctcctctacctgttgttttgtcacaaatggtgtctttttcatgtttatctcctaacttttacatagtaaagtatactaaaacatatgctacaacaaaatgggtatattttcaagaatttttatggtataatttctcattaggtaaatgtctttacttttttaagtatagttgatataactattcaaaactgatataactatttaaattaagatataaagggaaacaggaaaatgaacattaaagtacttcagtatattgataatacaccaaaaaataatataactaccggtcaggctgctgtaaccggtgataacattccttccaatagcagctccgctgtcaatagcaacggtgctgattttgatcaggtgcttgacgatgcaaaaatggctgaagctgctgttgccattgacagactgattgcccaaagcaacggtggctcagttgatatgtcgcttgtacagaggttctttgatcaaaatggaataaatatcgagctttgccgtaatacagtttctccttctgccgcagttaataatacagctgcttattccggttctccagcaataaacagtggctctgtaaagcttgaagcttccggtttgtcatgctctgccgatcttgatgcaatttttaatgaggctgcctcaaaatacggtgtggatgccaaattccttaaggctatcgccaagtgcgagtctgacttctccacagagtgcaccagccgttcaggtgccatgggtatcatgcagctcatgccacagactgctgcctcacttggtgtcacaaacgcctacgacccataccagaatatcatgggtggcgccaggtacataagtgaaaagctcacccagtataatggtgacaaatcactggccttagctgcctacaatgcaggctccggcaacgtagccaaatatggcggcattccaccatttaaagaaactcagaactatgtagcaaaggttatggcatactataattcataataaattgtattctgactcacataaaattatattttaattcaaagtggcttgacaaatgctgatgtatatagtaaacttagcaagttgatagttgctgatgtggctcagaggtagagcacttccttggtaaggaaggggtcacgggttcaattcccgtcatcagcttatttaaagaaatccccgaaactcaagattttccagtaaaatcaagagtttcggggattttttgtacttcattttttcaaatcagatttgtgttttaaaagtggttttcctaagaattttccaatttagttattttatatattgaatgccacagacataaagcctgtggcattcaatgtatatgaggaaaagcatatgcgacgtcaattcagtgcacatgaataatttttagtcggaactgagtgtaccccaacacatagttgaaatacaacagctccttttgatgatattatagtaacacttaattgtgtcctaaatatagccatgtgataaatattttcttaaatttggtaaatatttacaaacaaactcttaatccggcagaaatattctatatttcaacaatatatttctcgtacgcattgataacagtagtttctcccaccttgtcaagcctgacaaactgcctgccgtaactcatatgaacatgtccatgcacaaaatactttggtctgtactgctcaataagcctgttaaacacatcaaagcctttatggcatatatcctcaccatcatgcagtccctttgccggcgaatgggtgacaagcacatcaaagcctttattgcgcttaagcttccaccacagcttcttaacgcgctttgtcatctccttctgagtatactgattttctcccggtttatagcggtttgaacctcccaggccaagaaaccgtacaccctcatattcgtaaatctcatcctcaatgcatatgcagccttccggcggctttacattgtatttgtcatcatgattgccatgcacatacaaaagaggtactccaaccatcgttgtcagaaaggacagatagctcgagtttaagtctccacatgatacaataatatcaattcctttaaaatcctctttcttaaagtattcccagtacattttcgactcttcatcagctaagaatagtatcttcattacagtttattttcctctacaccctttagttcaaccaccatctttgcattgtcaacaaactcactcataggcggaatactacctacaacattatctacaagccagtccattttcatgatatcagacggtttcatctcgtgctcacctttgtttttaagctcgcccttctgattatatatctgtccaaagaacggcacaacctcaccctttgtgatatcgctctttaaatgatccgcaagccttttcactccataaggtacatgctttgaacaaatcaggtcaataacaccggctgacatgccccaccagtaattaagtgccttaacctgctcctgtccttcagccttgtaggagcctgccagtacgctctgcaaaagtttctcataaaacactccccagttccatataggcatggcaaggtttaatgcctgtccatcctgcagcttgtacagaccaaaatatctggacgcgtcattcggagtaataatatcctgatctgacacataatggaggtcattttcttcaaggaatttattcctgtcataatcctttgtctttgaccatgccagatatacctttgcccttggattcacacttgcaactcccagagcaaacgcgttgatattggcaatcatgccatatatcgggtagtctgcaatatatgcaaccctttcattgtctgtgacagctcctgctatcattcctgcgagaaactttgcctcatacatacgtccatagtatgttctgatataaggatgaggcgcattcagcgaacagttgagtatataaacctccggatgctcaacagccacctttaagctgtttggcatcatctgcggtcccacacaaaaaactatatcggcaccggactttatgatatcttcaagcacctgctccacattgttctcatctacacctgccacatattctgtctccagtttgtctgaaaaggtttcatcaagatacatacgcccaagctcatgcgaatacagccatgcagatgtctttggctctctcggatacaaaaataccaccttaagcttcttctgtgtctgaggaatcagataattgagcagactctttttggtctgcacctttttcggatccagcaccagatttatcttgtgcttttccccttctgctgcaaactccttccatgtattgatgacgtttttgttgtaatcattctcagacatctcaagcatggcatccatgccaaagacctccataaatactgtaatagcatcacccagcttaatgtccagcctgtcaccaccgcggaaattatagacctttgaaaaatcaaacattaccttggcaaatttttccttggtctcatcatcccatctgccctcttttccaacaagcgaaagaagcttatcagcattgcccagcttcgtaaactccaccgagcaaagccccgtgatttcattgaacttcatatactcataataaagcctcacatcataatcatccgacagctttggaatctttctagtcacaattgcaggaatcgaaacggcgttgaagtacttgagtacactgaccctcttattgccctcaagcacataatacctgttcatgtactcaaatgccttgattggatctctgattccctcattcatctgtgcatctgacagattagaccacttcactgcaaattcggtttcccagtccaatatcggcataaaatttgccgcaaatgaatatgtcctgcccatggtgcttgttcctacaacgaaatccaaaggcacatggaccagccccatattctgctctgtctgaatatctgcctctgataagatttcatcaagcactggcagataaggaaactgtcctttagctatccttgccctgtattctttttttcccagctttaatgcttctgaatattctgtttcacccatattgtaatctccttttgaaactattttaacataaattcaaaaaaattaaacatttcctttgatatttttaaaaactctgatataatatatgttaggaaataggtaccacagtcatatggaggataaaataatgcaaaatatatctcgggaaaatgccgatatcataggcgaagtagccaatatctgcataggcaatgcagccacaacactgagcatgattctacaaaaaccgacaaatattacgactccgattgtagaggttttgaaaaaagaggatgctctcgatcatgatgatcgaattttaattaaggttccttacacaaaaggacttgacggaaccaacctacttattataaaattaaatgatgcattggttattgccaatctcatgatgggaggcaacggaagtaatgtttctgatatgacacttgatgaaatcacactttccgccatatcggaggctatgaaccagatgtgtggtacaatagctacatcaatgtcttcgctcttaaacgagccaaccgacataggttttccgcttatcaattcaagttatcagaagacctttgatataccggacgagttgtgtaacggaacagatattgtcaaggtgacattcaggctgactgttggagatttaatagacagtgatctcttacagttgtatccaataagcatagtaaaacagattatcaaacaggaggtttaacaaaatggctagaattttaatagttgatgatgcagcatttatgagaatgatgctgaaggatatccttacaaagggtggattcgagattgcaggcgaggctgctgacggaaatgaggcagttgcaaagtacaatgagctcaagcctgatcttgtaacacttgacatcactatgccaaataaggatggcatccaggctttaaaggaaattaaagcagctgacccaaatgctacatgcgttatgtgctctgctatgggacagcagtctatggttattgacgctatccagtcaggtgccaaggatttcatcgttaagccatttcaggctgaccgtgttatcgagtcaatcagaaaagtacttggataatatttacatacaaaacaaggtctgtcagtatagctgacagaccttgtttttattatatttttgtaactgttcagtacattcacagctgcgcaagactctcaatagccttgtcatcaagaataacctttgcatgctccataagaaaagcccttttgtcagcccctgcaatgatatcatctgcatactcatctgctatgacagacatcttttcaagctcatgctcatcatagcccgataaatccatgctcataaagtactctccctcaaacttaaaaagctgtgagaatggcattggcagtcctttaatcatctttgcaaatctgacagccacatcaaatttttcaaaaatgaacattacaacagacaccatatcctgcttttttgcagttgtcctgccttttttatttttctcattctctgcagcctcagccggcagcgaattaagcagtccattaacgatatctttaagatgctccatcattccctcagtagcagggtgttcagaaaatgtcagagaaagtgtgtgatccgccaaaaaatctgctctcacagtcttgattcccgaattaaaatcagttccaaactcttctgaagccatgtcaaatatctggttcatgaattcctgggtgcgctcgccattgctcataatttcatccattgtatatcccagatcatatatttcttcttctgaaataacacattttatagtgtgttcacctattcttgaaaactccataacaagcttcacctactttctttttagcttttgtctgatacgggatagtgcattgtcaattgatttatctgattttccgagcatatgcgctatcgttgtataattatttccttccagatacaattgtagcacttttttctccatattactcagtttattccacaattgttccttaaattccttaaatttttccttctctatgagaagctgctcaggacttgcaatatcatcttgcagtatttcttcaaactctgtcccatcactgtcactctgcgaaaaggatatatatgtgttaagcggcatatgtttctttcggtttgaagcctcaagcgccgagctaagctgccttgtgatgcatagctgtgcaaagctgtagaaagatgcttccttgtcgctcttatagtctctgaccgctttaaacaggcctatcatgccctcctgaataaggtcatcattctcaccgcctatcaggtagagtgcatttgtctttttacgcacaagcggcttatacttttccaatatatagtccatgatttcattgttgtcaccatggtcatttttgtcattatgaatcctcataataagctcttcatccgtatatgcgctgtaatcttccactatatgcttcctattctataaatatacaattcataatacacaccactcatcccgcgacatgtaatctactttccactcttaagtctctgtctgactatctcatatgcaagcacgcctgtcgcaaccgatgcgttcagtgagtcaatatcgcccaccataggaatagaagctgtcatatcacagttttcctttacaagcttgctgactccgtcaccctcattgcctattacaagacctataggacctgtgaggtttaagtcatacatggtagtgccacccatatcagcacatacaaaccacatgcccttttccttaagctcctttatagtatttgagatattggtaaccttggcaacaggtgtatagtttatcgcacctgcagacgtctttgccactgtaggagtaagtcccactgcacgcctttttggtatgatgatgccatgtgcacccgcctgatttgcggtacggattattgcaccaagattgtgtggatcttctataccgtcaagtatgatgataaaaggcggctcgccctttctttcggcattttccagtatgtccgaaacctcggcatactcatatgctgctgaaactgcaatgacaccctgatgcttgcctgtctcagacatctgatcaagtctttcctttgcaacatagtttatgattgcatcatgctttctggcctctcttgtgattgactttattggtccgtcctgacagccgtcaagcacaaaaagcttgtctattgtctttcctgaacggaaagcctctagcacagcatttctgccctctatataattctcatgaaatttttctttattgttgttatccatattttcctcttattttgtgctatatttcaattcctaaaagctccactccaagcttagtgagtgaaacaaccctctcaaaatcatccttcagataaagatagcccatgaccgcctcaagccctgtagctttcctgtaatcagccattgtagcgttttttgccatggaaggtgacttggcattgcgccccctgtgatacacatcactctcctcctctgtcagatgaggtaaaagtgcctctatcatgagagcctgcgtatgtgcctttactatattacttgtgtgcttatgaagcagatttgcctttgtattgccttttcccaccacaactgagcggatgacaatatcaaatatgccatcaccgatatatgcaagtgtaagcggcgagtatgtccttatatcaacatcctttattccaaactgttccttaatatatgagtctatcttcatactatacaagctcccattttactccctctctggtatcctttatggcaaccccctttgccagaagctcatctcttatggcatcggctgtcgcaaaatcctttgcctttttagcggctgcacgctctgcaattttatcattgataaatgcctcaagctcactgtctacagatgacgatgcctcaagtaagacctttcctgattccctaagtcccagatcaagtacctgctcaaagtcatcgataagtgcaagcttagtcctgtctgagatatcagccttaagcacatcatacactatggttatagccattgatgtattcaaatcatttgaaactgcatcagtaaatttcttcttaaagtcagcaaaagctgtcttatcaatatcaccttcatccttaagctctgccacacgctttgcaatcttattgtatgccgcaactgcattgtcgagcgcatcaaacgaaaactcaagaggctttctgtagtgtgactgtaagcagaagaatctgtaggcaagcggattgtagcccttctcctgaagcaccgaaactgtgaggattgcacccttcgacttactcatcttgccggctctgtcatttaagtgattgacatggaaccagtacttgcaccagtcgtgtcccagatagctctctgactgtgcaatctcattggtgtgatgtgggaaaatattgtccacaccgccacagtggatatccacgtactctccgagatgcttcatgctgatgcatgagcactctatatgccagcccggatatccgacgccccatgggctgtcccatttaagagcctggtcctcaaacttagactgtgtaaaccagagtacgaaatcatttttattcttcttgtttacatcctcctcgacatcatctcgcactccaacctgaagctgttccttctctactgctgaagagaacacaaaataatcatcaagctttgatgtatcgaaatatacattgcctcctgcaaaataggcatagcccttctcgataagcacctccaccatatggataaactccggaatacagttggttgcaggctctacgacatcaggcatcctgttgtgtacagccgtgaaatccttgaaaaaagcgtccgtgtactcctttgccacctccatgacgctcttgtgttcacgctttgcgccctttagcatcttgtcctctccggtatctccgtcgcttgagagatgtcccacatcagtgatattcatgacacgctttacatcatagcccacatagcgaagtgctttctcgagcacatcctccatgatgtatgagcggatatttccgatatgtgcaaaatggtaaactgtaggtccacatgtatacatgccgattttgccgtcaacacgcggaacaacagtatcaatctgtcttgtgagtgtattgtaaaacttgaaattgttctccattatttatatctccttttggatgatttataactatctttttattttagcatgttttccctatatattcaaatcaatcagtctgacagccgctacagccgctgcatccgcctccgacctgcatacttgcctcatagagacctgtaagtgagcagattgcctgtgatgcaattccctcctcgcggcctgtaaaaccaagccactcctcggtcgttgcctttatatttacctgttcctttgcgatttgcagcgtatcagccacattctgctccatctgctcaatatacggacgaagcttcggcttttgtgcaattactgtcgcatctatgttttctatcacatagcctttttttgcaatgaggtctctcacatgctccaaaagcttaagactcgaaataccctcatatgccgggtcggtatccgggaaatgctttccgatatcgccaagtgccgctgcacccaagagtgcatccattatcgcatgcaacagtacatcggcatccgaatggcctaaaagcccgagtgtatgcggaaccttcactcctcctaaaatcaaatctctgccctcaacaagcttgtgcacatcatagcccattcctactctcatatatcgtctctctttctatcagatacaatacctcatgttattgtcaactgtcattgctctgtattttggttttttaaatatagtataccttatttctcctgttgcgccaagatattattttaagctattttcaaataaaagaccgccccggacaaaccggagcggtctttattaaaatgggaatagtccattaaatgtcttatgcaagtgctgcagtgatgatagccattgagtaaacctctcctgcattacatccacgagaaaggtcattgattggagcattgagtccaagaaggattgggccgtatgcttcgaaattaccaagtctctgtgcaatcttgtatccgatatttcctgcgttgatgtcagggaagataaatgtatttgcatgacccgcaacctcagactgtgggcactttgtgcgggctacacgtggtgcaactgctgcgtcaaactggatttctccctcgattggaagatttggatatttctctcttgccttgtgagctgcgtttctcatcttgtcaacatcctcgccctttcctgagccaagtgttgagtagcttaagaatgcaacctttggatcgataccgaagatcttagcacactctgctgattctcctgcgatttcaacaagctcgtcctctgtaggatggatgtttatagcacagtcgctcattgcaagcacctcattctcacctgttgcagatggacgaacaaggataaagcatgaagatacgattgtgttgccaggctttgtcttgataagctgtaatgccggacgaactgtatctgctgttgagtatgtagctcctccgagaagtgagtctgcgatacccatctttacaagcattgttccaaagtagttagctgatgaaagaattcccttagcctgctccggtgtaacacccttgctcttacgaagctcgcagaataattcaaccatctcatccatacggtcaaagttcataggatctataatctctgctccacggatattgaaaccactcttctcagcgcttgcactaatcttctcaggatctccgacaaggataggatgtaagaagttgcttgcaagtaaacgcgaagctgcctcaaggatacgtggatcctctccctctgtgaatacgattttctttgggtctttctttaatatttcgattaactgaccaaatccaaacatgataatgtctcctttatgtatattatttattatttaaaactatatctggtttcacaccactgactataatatacttatttttctcgaatatcaataattgttaaaaggttgtcaagatgttcgcgaaaaaatccaatccatgatatttcatggcacaataaaaggaaccggattaatattttccgattccttttataatgatcactatttattcgtttaaggagtatttatcatacaaaaccgtttactctgcaagtgccttaaatgcctcatcaagatcctcaattatatcatccacattctcagttccgattgaaagacggattgtgtttggcttgatgccctgatctaagagttctgcctcattgcactctgagtgtgtggtagaagccggatgtatagcaagtgacttaacatcagctacgtttgcaagcagtgagaaaagctcaaggttgtcaataaatttctgcgcttcctttgctccacccttaatctcgaatgtaaatatagaaccgcctccgttagggaagtatttcttgtaaagttcctgctgctctttatcctctgaaatagatggatgattaaccttctctacgagtggctgatcctttaagtactgaactaccttgagtgcattctcaacatgacgctccacacgaagcgaaagtgtctcaagtccctgaaggaagataaatgaatgaacaggcgaaattgttgctcctgtatcacgaagtaaaattgccctgatatatgtcgcaaatgctgccggtgcgcaatcctttgcaaagcttactccgtggtatgatacgtttggctctacaagccatggccatttatcattctgtgtccagtcgaatttaccgctgtcaattataactccaccaattgttgttccgtgtccaccgatgaactttgttgctgagtgaaccacgatatcagcaccgtactcaatcggacggacaagatatggtgtagcaaaggtattatctacgataagtgggattcctgcctcatgagcgatatttgcaattttttcgatatctactacctctgagtttggatttccgagtgtctcgatttcaatagcttttgtattctctttgatggcagccttgattccatcataatcgaatggatctacgaatgtagcctcaattccgtaatcaggaagtgtatgggccaagagattgtatgtaccgccgtagatattctttgctgcaacgatatggtcacctgcgtgtgctaatgcctggaaagcatatgtgagtgccgctgctccggaaccaacagcaagtgctgccacgccaccctcgagtgctgcaattcttctctcaaatacatcctctgtagggtttgtcagtctgccgtagatatttcctgcatctctgagtccgaatctgtctgccgcatgctcactgttatggaacacatatgatgaagtaaggtagattggaactgctctcgcatctgtaaccggatcaggtgtttcctgtcctacatgtaactgtaatgtctcaaattttaaatttctgtctgcataatgtttcttgctcatattaatatcctcctattaatgatatgttaatgttatttgtttttaattttaattccgggatactgttcccttgaactaatcatatcatatcatctttctaggaaaagtgataatacttataactaagagcttgctataaatatattttataagcaattgctttccaaaacatcagaaagctctctcgtagctgcaccaacatccatgttatttacagcatagtcacatatctggcggttgcgtttctcggcatctatcgacagaatacgaagtgtcttttcttctattgagtaatcctgctctatgatatcccggattaagagctccttgtcacgcgccacatacactataacagtaggaaaatggcgcttcatggcaatggcgccgcacatgtcaagcggcatcacgacaaagtgtccctttgcaagcaccgcctctatatcctccattttagtgccatactgtattcctgcgtaccttgtcttttcaaagaaatcctgtgcattgaactcatcctccgtcaggtacctatgcttatctccgggcttggtacagtatgttttcggattctcaaactgctccatggcgcacaggctgtctgagagcgctgtttttcctgagcctgatggtccgacaagcgccacaactgacggattttttatatttttatttctatataatgacgcatttattatctgctccacgagatatacaaactctgtgatattattaacagataaaagtcctgtcatttttgaattccacggttttctcatgagcacgggatacgtggccggtgtctcaagcacattgtgtatggcgtcatctaaaattatatcaaactgcacaagattttttgcattgccaagtatgatattttctgtcgggaaatcaggaaatgcctccattatctggctcgccctcactcccatgaagcccggtgccaccgccgtgataaaatatacctctccgatatccatgagctttcttatcatccgctttgtctcttctgtaggcttctgtctctcgtaaagtgtattatcccggtaaaattcctttatgacagaggctctgccggtattctcccaggaatctatatcatccagcgtaagaggtggggtgatattatattttttgtttgccatatctatggctatgctgttgaatggggctgtcacatcatcccagtcaagtcctattttaggtcttatcatgcttatccctttctgtttcgtaactatttataacaaaaagacctgcaacaactgcaagtcttaacaagtagcgagggagagactcgaactctcaacctcccgggtatgaaccggacgctctagccagttgagccacctcgccatatttgattgatacctttaaaaggatgggacctacagggctcgaacctgtgaccctctgcttgtaaggcagatgctctcccagctgagctaagatcccgtgtcacttctgttgaagtaaagtagcgagggagagactcgaactctcaacctcccgggtatgaaccggacgctctagccagttgagccacctcgccatatttgattgatacctttaaaaggatgggacctacagggctcgaacctgtgaccctctgcttgtaaggcagatgctctcccagctgagctaagatcccatgtcgtcaaccgacttgattattatatacagtcggcaccttattgtcaacaacttttttcattttatttaaaaaaatttcaactattcagaagtctctccacaagcttcacgcactctgccgcatcctttgaatatccgtcggctcctatctcgtctgcaaagctttgtgtaatgcaggctccaccgattacaaccttgctcttacagcccttttccttgcagatttccactacatccttcatgcgcatcatggtggtggtcataagagctgacagtccaataactgccgcgttcgtctcaatcgccttgttcacgatatcctcacaaggcacatcctttcccatatcaatcacgttgtagccatagtttttaagcataagcacaacaaggttctttcctatatcatggatatccccctccaccgttgcaatgacaagagtcggcatatcatcacctgagtccttcttttcaagtaacggctccagatgctctatagcaagcttcatggtatttgcgctgccgataagctgtggcaggaaatatttcttctggttaaaaagctctcccacctcattaatagccggaatcaggctgttattaataatctcgtcaggctttgccccatcagaaagcattttctttacttcatcaattatactgcccttgtttccctttaagacagcctgaaataccgcatccttactgcctgctgcgcatgtgccgtttgaagcagacgcatcattgtccgtttttttcacaacaacagtctcatattgggccttttcctccgcaagcctgctcatgcgctcgatgtatgctatatcgctgtcaggtctgtcgagcagcatatccgatgcaaatgcagcattcatcaaaagctcctgtgatggattggcaatagccatggtgagtcccttgcatatggccattgtaagaaacgctgtgttcacgtacatacgctcaggcagtccgaaggatatatttgaaagtccgcatattgtaggaagctttttctcatccttgcagtacgcaatggtctcatagcactcgattgcggcctttggatttgcacctattgtcgcaacaagtccatccaccactatatcctcatgtgccattccaagcgaaagtgccttgtcataaatagtatttataatctgctttttctcctcgacatcctttggcaatcctgcatccgaaagtggtaagagtatgaacatcgctccgtattttgccgcaagaggcaatagtttttccatcttctcagtctcaagagaaatagaattgattagagctcttcccggataaatcttaagagcctcctctattacctccacataacttgaatcaatacaaagtggacagtccacggtagatgaaacctcatatataaccgatttcatcatctccttctcatcgatgccattcatacccatattgatatcaagtattctcgcaccatttgtctcctgctccatagccatctggcgcaccaggtcaagctttccctcacgaagctgtgcctgcagctttttcttacctgtaggattgattctctctccgaccacagtaaagttgccatctaagtcaatctctacattctttcgttcggatgcaagcactcttctatgatgctcaagcggcttatgaacaggcattgactttacagcctctgtgagagcacgtatatgctccggtgtggtgccacagcagcctccgacaatggatgcacctgcctccacaacccctctcatcgcatcggcaaacatatccggagtcatcttgtatacagttttaccatcctcaagctccggaagccctgcatttggcttggcaataagaggcacagtagagtactctgccattttctcaaccaacgctatcatctcagtaggtcccgtcgagcaattcacaccgatagcatccactccaagtgactgcagcacaacaactgctgtctcaggcggtgtaccaaaaagagtcctgccatcctcgttgtaggtgagtgtcaccataataggcaggtcgcttacctcttttatagcaagcactgccgctctgcactcctggagactcatcattgtctcaaccacaaaaacatctgcgcctgccgcatcaagaatcctcgcctgctccttgtacacctccaaaagctcctcgaacatcagatccccgagtggaaaaagctgtctgcctgtcatcgtcatatctgcagctacaagtgccctatccccgacagcctgctttgacaggccaacaagcgtggtgtttatctcgttaattttctcctgtaaaccatattctaaaagcttaatcctgtttcctgtaaatgtaggtgcataaacaatattcgtgccgttatcgacataagccttctgcaaatcaagaatcacctgcggatgctccatcacccattcctccggacacacacctacaggcatgcccgctgccatcaggtttgtaccggtcgctccatccaggataactatgttttctctgatatattttctgaattcttctcttgtcatttcgtttccttttctgtttcagctgttattcactccacagtgtaaaatatttcaaagcaaaagctatgtgctcttcatccttgaaatttgtgataatttatattatcattgtaaccgattttaaaacacaaaaatcaatagtctattcaccataatatactaaaacactatatttttcaaacaaaagaaaggatttcttatgaaacttatcgctttagatcttgacggaacacttttcaacaacaaaagtcagatatccaaggaaaatataaaagctataaaagaggcaactgctgccgggataaatgtggtcatctccaccggccgtccattcggagggctgccgtttgaggcaattaaggacaccggcatccgctacgctatcactgcaaacggaagtgcaatctacgagattgacaccaaaaaatgtctttacgaaaactgcctttctgatgagacagcgttttcaataatcgattacctgatgacaaagcgcgttcatatggatgccttcataaacggctgtggctattctccatacaagtgtctcgaggatgcaaaggatctcaaaatgcctccttctataaaggaatacatcatgacaaccagaaaacgcgtgaacgatatcactgaaatgatgcgcgaaaacaattaccatatgcagaaaatgaccatcaatttcccaaaggatgtagatgataactactactgccgcgacgaagtatttgaacacctgaaaaaaatccctgaaatcacgctcgtaagcggtggctacggtaatctggaattcacaaaagcaggcgttgacaagggtgtggcacttcataagctggctcaaatcctgaatatagcagctgatgagacaatggctgtcggtgacaccgaaaacgacatggctatcgtaaaagccgcacacatcggcgtggccatgggaaatgcaaccgatgaacttaaggcacaggctgattacgtcaccgacacaaacgaaaatgacggcgtagccaaggctatccgccactttatgggttaatctcacaaatttaatataacgataccggtcatataagagtataatagttgtttagcgcaaaatagctgtttaacacacaataaataatcacctgtcatatatatccaaagaagcacatatacttctaagacaacatatgacaggtgattttttgattgtaaaaaaatatttatccaatccacttgtgaccggaactattttcctgacacttgccggtacaaccagtcggtttatgggttttttctttcgcatatttcttaataacgtcatgggctcaacaggtcttggactctatcagcttgtgattccactcatgtccgtatgcatgtcactctgctgcaacggctttcagactgctacatcaaagcttgttgccgaaaaacctcaaaacaggcagattatactcatttgtgcaataattatgtcagccaccattgctcttttactcacaattattatgtattccaatgccaactacataagcatttgtattttaagtgagtcacgctgcacagagcttgtcaaggcgctgtccttttccattctgcccgctgctatccattcctgcataaacggatactattatggattgaaaaaagcagccgttccagctgccactcaattaattgagcagaccgcacgcattggcacctgctatctgatatacgcaatactatctgacggtagcagctgctttaagcctgtatactctatatacggcatcgtggcaggcgaagcgagtgcaaccgtcttttccgttatcacaataaaaaaagatttctcatactttaaaatatccgtcaaaagcctgaaaacaacagcctatggcatggctgcgcttttcatccctttatcactaaactacatattggcaagcttttcatcctccgtcgaaaatgtgcttatcccgagaactcttaaactctacggactatcaccggcattggcccttgacatatttggaaccatttccggtctcacccttcctgtgcttttattccccggtgtgctttgcagctgtgcctgcgtgatgcttctgccatctgtttctgaagcgaatgccgccggaaaggatacaaaaatcacaaaaaccataaactcctgtgccttattcggactatgctttggtcttatctttacatgcatattctatctgctgtcggattttataggggattttcttttttcatcgaagctttgtggatatttccttagaagactgtgttttctgtgcccactgatgcacataagcggaatgctctgcagcatactgcatggtctgggtaaagcaaagcaggtgctctttgtcaatctgctcacctgtgcaataagaattctgatgattatgcttctcgtaccccactatgggatagatgcatatctgtgggctatgcttgtgtcgcatgtgtttatgacacttgctgtcgggattctcacctgccacacagcacacaaataaaaaaagcctgcacatactccaggcataccggaatatgtgcagactcataaaactacagattatacacgtgaaaggtactcacctgttcttgtatcaatcttgataacatcatctgtctcaacaaaaagtggtacataaactgtagcacctgtctcaactgtagcaggctttgtagcacctgttgctgtatcacccttgaagccaggctctgtctctgtaacagtaagctcaacgaaaagtggtggctcaactgcaaatacattgcccttgtgtgagcaaaccttacacatctcgttctcttttacaaacttgagagcatcgccaacctcatcctttggtaagtcaatctggtcatatgtctcaacatccatgaaatgatagaaatcatcatctgcataaagatactgcatatccttacgatcaatgtgtgctgtagggcatttctctgttggacggaatgtcttctcaacaacaccaccactgatgatattctttaattttgtacgtacaaatgctgcaccttttcctggtttaacatgctgaaattcgataatctgatagatgtttccctcgaactcgatagtaacaccgtttctgaaatctcctgctgaaatcattagttacttcctccttaaatcgtgcgagcctaagctctctcattcgtccattttacaataaaaaacaatacatttcaagtatttattttctattgcatgaatttgtattggttttatattagtttcttgcctcgatatccgatatcatagctattctctttgcgtgtctgccgccctcaaactcggctgtcagataagcctttacgatatcctttgcaagctcaacacctacaatcctctcaccaaaggctatgatattggcattgttgtgctgttttacaaggcgtgctgtggctgtgtctgagcaaactgccgcacggattccgttgaccttgttggctgctattgagatacctacaccggtaccgcatatcagtattccgcagtcaaactcgcccgatgccactgcattagccaccttctcaccatactccgggtaattgcagctctcactcgaatctgtgccgaagttggtcacctcgtgacccatgctctcaacatactccattattgtctttttaagctcaactgctgcgtgatcgtttccgattgcaatcttcataatatatatgcctccaaattttaaattattagttaaaaattatttatttactttctttaaatgcctcttgtagcatgcaattacaggcttttcaataaagcgcttaagcacaatctgtatctcctcatgcgggtcaataggtgctacaagtattgatctgatgcccgtaagattggctccgatgatatccgtaaatatctgatctccgacaaacagagtgtttttcgtatctgtgccaagcctctccatcgcagcacgatagcctgatggcttgggctttcctgccttgtagatatactttatcccaacctgcttagcaaagctcttcacacgcggctctttgttgtttgagagcacaaggcacgaaaaaccaagctccttaaggtgcttaaacaaagcaatcgcccgctcatcagcaggcgaaccatgagtcacaagggtgttgtcgatatcaaaaataatgcccctgtagccctccttatataatttatcaaaatctatgctgtatgtcgagtcaatgtactctcccgggtataaaaaactcatagtataaaattctctgtctccctgttaatctgttcattcaaggctgcctgctgcataacgatgccatccgcactgccaacaaaatgctgatactgctgcaataccttatccttgtctaaatcggatacagcctttgcgacatcaagtgtgctaatatcactgtcagcacccttaagctcatagctcgcattggaatcatatgtctttgcataatcaagcgaggtaaagctctgccttgcccttgcatcctcataatcagccgtatcatcagcaatggattgctgtgaagctgtgtcatccactgcctgcttcgaactcataatctggctgtttctaagctcgtttacccttatggaattgtatgaataaaagccttcgctcgggcgaataccggaaatgttcatacgcaccttcccatcctgttttaaataaaaactgctgcctaaacactatttggtgtcaagcatctttttaagctctgtcataaatgtattgacatccttaaactctctgtaaaccgacgcaaacctcacatatgctaccgcatcaaggtcctttaatctgtccataatcagctctccgatgagtgatgtagagatttccttttcctctctggcaaagatttctatctcgacctcatctacaagctttgagattgtatctgctgaaatcggtctcttgtgacatgcaagaagcacgcccttttcaatcttggagcggtcatactgctctctgttgttgtccttttttataacgatgagtgggattgtctccaccttctcatatgtagtgaaacgcttgccgcaatcatcgcacagccttctgcgcctgatagagctgttgtcatcagccggtcttgagtctattacccttgtgttgtcactactgcaaaatggacacttcatgctgtaccctccgtaggtatcatatagtatgaagaagcaaaatatctttgtttctcattataatacttcaaatcatcatctgtatttaaaaaaacctatacatattttagtatatatatactaattttcgttgtcaatatgttttgtactgattttgacttttttataatttttttgtatttataaaatcataacagcttgcgccgcatatcagactcacatatatttaccaatattatatcgggtccaatcttcacaatcttaacccatggaatacaatattcataatccctgcaaaatattcccatatattttcccggtcccggcactataatcgcacagattttgccacagaccgggtcaaactccaaatcccgcacatgccctatgaacctgccctcctccacgctcacaacctctttttcgcataaatccagaaaacgcataaaacagacctcccttggtctatcttatgcgtttctttttgattttgtgcttataaaagcgttttattcataaaattatacattaaatctgaaaaggattacatctccatccttaacaacgtactcttttccttccatgcctacaattcccttttctcttgcggctgcaaggcttccgttgtcaagaagatcctgatagttgactacctctgccttgatgaagccacgctcgaaatcagtatgtatcttgccggctgcctgtggtgcctttgtacctttctttatagtccatgcacggcactcatcctctcctgctgtgaggaaggaaataagtccgagaagtgaatagctggctgctacaagcttatcgagaccgcttgactcaacacctaaatcctcaaggtactccttcttttcgtcctcatcgagatctgcaagctcctgctcaatctgtgcacagataacaaatacctctgcgccctcttcctttgccatttctcttacctttgcaacatgcggattacttgcgccgtcatctgcgaggtcgtcctctgatacgtttgctgcgtagatggtaggctttgctgtaaggagattatatcccttgaaccaaagctgtgcatcctcatcatcaggcacttcaaaggttctggccatctttccgtcctcaagatgagcctttactgcctcaacaagctcaagctcctttgcaagtgtcttgtccattcttgcctgctttgcaatttttgcaattcgcctgtcgagaatctcaacatccgagaaaataagctcaagattgattgtctcgatatctcttgcaggatctacagagccatctacatggataatgtttgtatcctcaaagcagcgcactacgtgtacgattgcatctacctcacggatatttgcaaggaactggtttccaagtccctcacccttactggctcccttcacaagacctgcgatatcaacaaattcgattgttgcaggtgtaaccttctttgtgtgatagagctctccgagctttacgattctctcgtcaggcactgaaacaatacctacgtttgggtcgattgtagcaaaaggatagtttgctgaaagcgctcctgcctttgtgagtgagttgaataatgtagactttccgacgttcggaagtccgacgatgccgagtttcatggtatatatatctcctttaaattgatttcatatgtattttgtgtatcggatgtttgttgatacaactatgtagtgtaccacattaaggaagatttgtacataatcttacgcaaatccccattcgttatatccattttcttacgcaaatccccattcatttcttccggtgctgttctttttcacgaaaaaaccttcccacatataacctaatatgcaggaaggttttcacattttttattcacttatcatctcatcacacttaatctgctcgatatgtatggcaaggtagcctgtctcattgtccaaaaactcatgatttaagtcctttccaagctccttacatatatcacctgccagtgcgaatgactccggataatttttctcgataaactgattgagatcaacctttaatttttctccggtcgcggctcttgataccatgtggcggatatggttcatgaggcggttgtatgccatagtagtgacatctatgtgctttccaatcttttcctctataaatgtggcgcattttcgaactgctgccgccatctccatggcatccgatacctttgaattgtttaaggatgtatgaatatgaagagtaatgtagccgatctcatcatcaattatatcaatttgttttttatcctttagtatatggcgtatattctcagctatcttgtactccctataaaacatcacacggatgtcatcgtttaaaggattgctgatctgttctttgttttccatacgctttacagcaaatgctatatgatctgccataggaaataatatgcttctgtctatatgtccaaactcatgctctgcattatcaagcagtgtgtttgcaatctcaagatactccggctctatggattttactatgtcctttgccggacctctgtcccttgtctgggtcagctcatacagtgaatcctcttcagttggctcgacagactgtgtaattttctttccaaagcccacaccctttccgactataagatattctcttgcgctcttgtcctttaccgcaagcactgtattgtgatttaagacctttgtgattctgtacatatcattcccctgacatttttattacttctcgtaggtatcaactgcgtagagaggctcccccgccttaatcggtccatctgtgatgagacggattttctgattatcttttagctctgtgcagatgacaggagttgtaactgatggtgcgttcgcctttaagtagtcaaggtcaagcttcatgagcacatcgcccttattaacatggcatcctgcctcaacctgtacgtcaaagcctttaccctcgagctttactgtatcaattcctacatggattatcataccaattcctgagtcggttgtaaatcccaaagcatgctttgtatcaaaaacgaataaaacagttccatcctcaggtgctacaactaccccctcctcaggtgtgactactgctccgtcacccatcattttgctggcgaaggcctcatcaggcgctgttgagaggtctgctgctattcctgtcatagggcttgagatgatgactgtgcttgtcggctcttttgcgtcggaagattcctgcgctttgccttcgtctgcattttcattcttcacttcatctgcgtctgctgtattattttctactgcatcatcctcgaaatgctcctctgtcacacttgcaagataatcctcgaggtcagactttattactgttactctcggtccatagataatctgtacgccctgtcccttgtgcacgactcctgatgctcctgttgatttaagaagcacatcgtttaccttttcaggatcaattactgtgatacgaagccttgttgcacagcagtccacatctgagatattggctttgccaccgagacctcgtgatatagtctgcgagagctcgtctacagccgctttgtcgtcagaagtttgtccatccttggcagcttttctttcatttacatctgccttggtgtagagctttgtctctgtatcgtcatcctcacggcccggagtcttgaaatcaaacttctttataaggaagctgaaaataaagtaatacagcaggaaatatactattcccaccggaatcacgagcatccagcttgttttttcattgccctgcaatataccaaacaggaagaaatcaagaagtcctcctgagaaagtaagtcctacagcgatgtttaaaatatgcgctatcatgtatgcgcttcctgcgagcactacttgtactgcaaagagagccggtgctacgaaaaggaatgagaactcaagaggctctgtgattcctgtaaacatacatgcaagtgttgcagaaagtaaaaggcttcctgcctgttttttcttttccggctttgcacatttatacattgcaagtgcggctcccggaagaccaaaaatcatgaaaatgaactctcccgaaaaatatcttgtggcatcggcactgaaatgtgcgatgtttgcagagtcagcaagctgtgcgaagaagatgttctgtccaccctcaaccatatgtcctgcaacctccattgttccaccgactgctgtctgccagaacggcatgtaaaatacatggtgcagtccgaatggaataagtgctctctttatgataccaaagagaagtgttccgaaatatcctgttcctgtcactactccgccgagtgcatagattccgttctgcacagtaggccagataaaatacattaagattcctacaaacagatatgccacggttgagatgataggcacaaatcttgttccaccgaaaaatgacaatgcattcggcagctcaatcttgtagaaacggttgtgcagtgctgccactcccagtcctacaataattccgccaaacacacccatctgcaatgactggataccacatactgatgtgatggttccatcaagcacatcctttgcaatgcttccgtctgcaaggatttttccggaaatcttgagcatcgcattgattgatacattcataacaaagtatgctatgactgctgaaagtgctgacacctctttttccttctttgccattccgattgctactccgaccgcaaaaatgagcggaaggttatcgaatatggcacttccgaccgcattcatgattacaagaagtgcatggagtatagtcttatctccgagcagccactgtaaaccataggtctcaattgttgtggtgttggtgaatgagcttcctagtcctaaaagcaagcctgctaccggaaggattgcgattggaagcatgaagcttcgtcctactctctgcaggacaccaaaaattttgtctttcatgagcttttcctcctataaatgcagggtatgtaccgatttgcacctatcattctttttgttccagcgacaaaaaggaggcacttatcatacactaaccctgttaaaagttatgtacgacaaatgcctccctaaaagtaacacgtctgcttaagtttatatcacagaagccttattatttcaacacaattttccttacgagtttattttttgttaatcatgctgtttttatacatatttttttgtgaattatgtctaatgtcttttttctccagatgcctccatgtttccactatcataaagcattcttcccctgtgatgccctctgatgaatacacagccttttgtatgatgcgcatgtactcgtcccaatggattccgcaataatccggtccgcagtatttttccttcaggttagccagataaagctcatctgtcctgttttttgaaggatgtcccagtcctttgtagatgcggttgtttatcattattgctgccctgctgtaacggccttttttcaccctttttgcaagtcttgcttcccacaaaatatttcttcgccttttgatataaactatgatggctgtaagtgcagtcagaaaaatcacacagagtgaggtttttaaaatcaccggtggtatatgaggtctcgtttttaagttctgagcatctgtacgtttatccgcacctgactgtgaaccataagccttctcactgccatcacctgatgtactgtttgctgcagcttttgatgtatcatcttttgctgtgtcatcattttctgcatctgtattttttgtatcttcatttgctgcatcttcatccagtttatcttcatctgccgcagtatcattcatatgctcactatcattataagcagcaccggtgtttgttttctttccgttgacaccaatatagtcaaacggattctcacctgtcacatactcaaaatatcccggtgtcatctccaccggaatccatccgaaatcatccagatatatttcaacccaggcatgcgactgcgaatccttcacctcacatatatcctcatcattttcaccggatttgaagctgtcctcctttgcacagtatccgcttacataacggcatggaacgcccatctgtctgagtatcatcgtgccagccgatgcaaaatgcacacaaaagccctgtctgctatttgagaggaaattttcaactacatccttaccgtctgtggagggaggatttttgctgtacttaaaattcttcgatgtcagaaactgctgcaccagctgtgctgccgcaatcctgttggcatcattttctcttatatagcctgtgtacatcatattgcttgtgagctgtcctgtcctaagaagccactttgcatcttccgcaacaatcccgtcaccaccctgctttgcagtatagttttccattacataattattgtatgccgcatagaaatcattgttgacctcaagaggctgctcgggctcaaggctggacgtttccagactaccatcgaaaaagccgggacacgccgacacctcgatagtctttgtccctttatcctttgtgataaaaaagtcttcgtcaaaatctatatcacccttggcatctatactgtatgggtcgatacagtacggcaaataggtgtatttggtggaaagcttctccatcgtgattgtatacttttcggtggccggattggtctcatcatcataatagccatcaagcagcgtggctaatccgattgtagtctgccaggctgtcatccttgaagcatcatgatactctttttccatcccggaaaaatcagactttttaatccatctgccattctcataggtatcaccgtagaagcttctcaggtaaatattagaaggcgctcctgactttgcttctaccgtcatcaccgtctttccgctgtagcttgggtagtgattactaaccgagccatcctgtaaatcaatccccacgctgaagaatgattttacgctgccctccaaatccttttgaaaggcaagcatctgtggctttttatcggcaagtgtatcagcaagaggtttaaacgaaaatacacatataaaaagtattgctgacactgccgccatatataaaagcgccgccgctatccttaaagcctcattgccctgtgcactgccatttacatcatatcctgccactgtgcgtgcgttgccatctgcgataagacaccagagtgtacacagcgtgagcataacaacctcactgacacttgggcttttgcctatgcacagctgtaccgcaagcataagcgttggaaataatgtgagcatgcgtcttcttttaatttgaaccgccagtgtcaccagcaaaagcataactataaacgatacaaagccaacaaatgcccccgcaaaggctttatcgccctttggacagacaaatgaagtgccatagtacacatttattatctcaagatacctgccctttacatacaaaaagccgtcttttatatgctctgcagcctgccagtttacaataaacactccaagcagaaatacaagcagcagccccgtatttatcgcatggcgcacccattttcttgtgtcaagcgatgtaagcctgtttataaagccgcttatcaccgaaaaaataaacagccacacatacacataatatgggcatctcacatgtgaaacggtcgtattcacaacagacactgcacacaccgtaagaagtactgctgcagctgcattggcaagttcagtaagcaggacaccaagcactgtaaatgcattattataatcaggctttatctcatttgcgtcagatctctgccatctgcttttcctaaatgacaatctcgtttttttcatccgctctgccaactatctcctctcccctttttatctgaagtcttccgtccacgctaagcagacacacaagcttttctgcccggtacttttcctcatacaaaaaaagcgcatcattttttgtatccggctttattttaagaaaactgttcaaaaatatgtaaaagccctcctcgtcatccactctggctctcacaatatcgtttatggcgttatcataccacgccacataatgagagcatttttgatccataagcgaaaaggaaagtgagacaagaagcttcataaaagcatccgcctgtctgcccttctttattccccttaaatctgctactatggccaccgcacatgcctttggcaggctgttctcctttaccatcagctcatcagtccttgcagaaagcttccagtgcacactctgcagcctgtcaccattttgaaactctctgacatcaaacagctccgacggatcatatcccggtcttaaatcatcatagatatcagaatccccaaagaaatttctcactctgtccgttatcctcacaggaatctcatcaatctgcggcatcacctcaacatttgcatattttttaactcttttcgtgacataaaaaagcctcgaaaaatcatatagctttatccttacaagctcaaattcataattgccgcacaggtttacgctgtacaaaaaatcactgcctcctgacagccattttgtacttttttcgccggataaattatttttcaccgttacacggtatttaacaccatcgaagcctgcctccttcagcctgcaggaaagactcaccctgatactctcgccctgtgtggcgatagctatcggaatgtttatagctgccactgcccggtgcgcctttacaagcaatgctataaatgtcagcaccataaacacacacataaagcagccaagcagtgccagtgcagcattaccgtatatcatcgacatataaaaaactattgccgcagtaattattcctatcaaaaaactaatcacgattacctgcctttttcacataagttgtcggctgtttaacagcctttagtatctcatctatcactgaaagctctgatacgtgtgatactctcgccttggtatttagcacgattctgtgctttgtcacatccgcaaatacagaaaccacatcagatggtatgacatagcttcgcccactcagatacgcatatgcctttgccatcctaacacacgcaatcgtacctcgcggactcactcccagctcaatgtacggacttgtccttgtcgcatcaaccaggtccacaatgtacgagtaaatactgtcatgtataaacacctgctcaacctctccctgcatctcaacaagtccctgtgcattcataacaggctttatcgtatactcatcagccttcacacttttgccctttgcgatatccacctctgcatcatgtgaaggatatcccatgctcatacatatcataaacctgtcaagctgtgactccggcaacagctgtgtaccggcgctgccctttggattttgagtggccatcactataaacggctccgggaccttcctgcttattccatccacagtaacatttccttcctccataacctccaggagcgcagactgtgttttgggacttgttctgttaatctcatctgccagaaacagattacacatcacggcaccctcgcggtacacaaactctccggtctgcttctgatacatagaaaagccaagtatatcagcaggcaacacatccggagtgaactgtactctgtgattcacaagcgccatcgcccttgaaaaagctactgcaagcgtagtctttcccactcccggcacatcctcaagcagtatatgtccacctgccaaaaaggcagcaaatgccttgatgatacaatcatccttgccctttactgccttttttacttcgtctatcactaactgtgcattattcatttgtcttatcccccagttaatcattttaaactgccgatgatcatcttcatcatcttattcataaatagctatatttattttacatattttgtatcaatatttcaacttttatcccttaaattaaacaattcttaaaattaatcacttctgccgctacactgttccggtgatgacaagtgtgctctcacccggtgtgacaacccacgctccggttgtgctatcctgtgtgtaggttgccgccggaacagtgattgcacctgccgtactcgaaaatgtgcctgtcgcctcattataagtgtaatctgtagttgcagtccaggctgtgccgtttaatgcggctgtaagattgtttaaaaccggagcaaatgtatctgttataaccacgcctgtggtattggttgccgcaacgcttccgtagttttgaatcctgaaggtataggtcagtgtaccgttttccgtcacaggaacagggcttactgacttagtaattgcaagatttggtgcagcctcggcatttactgtctctgctgctgtgactggagtgattccggtaccgctaactgtagcagtgtttgtaacagcagcctctataccaagaggagcatactcatttaacgctgcctcatagatgacagttgcattgccacctgcagggacatttatgcctgttatgctaagaggcggtccctgggttactgcaggcgctgcctggagtgtgccgtttgtatagtattttgcggtgttattcacataggttaatggtacaagagtgttggtgttaaaggtataagcacctagattgtcagaaagtgtcagaccgtttatcgcggtatttccggagtttacgatactcaccacataggttattgtatcgttttgattgtaggtgtttttgactgctgttttcgtagcagaaagcacctccagtatttctccgactgctatatttgaattggctacattgttgccataacgaagctgcgcctgattagtaaatcgtgccatatattttccatcctttcatatattcaggtatggtttaatatatgacacaaatctacaaatgacacagattatttactgtcctgtttatttttctccacatcagcctttttgataagctccagaagcttttcaagctcttcctcatccacgccggtgtagcctgaaagctcactaaggctcggctcgaaacccttatcggattttagtttctccactgcacggtttaccaatgaaacctttcctaccacagtattctcgctctcatcctcaccggtctgctccctgatacactctttcatagactcctctatggcatccagaagctctttttccacatctatctcatccccgcagccgcagagctcagtaaggcacatgaaaagtcccatgtttccctcctgtactacgtcctcaaagccctctgatgtaacagcaagcttctttgccatggcaagcacacttttgagccagaaatttgatatagtgtgtatcacactctcatcacctgcaagcagctttttgtacatatcgtcctgctcggcttttgtgtaatcaggtatctcttcaagctcctcaagatacatcctaaacataggtgaatccggtatgaggctgtcctcgtctatatcaggctcagcttcattatcctgcttggccttattattctttccacctgctatggcagccatcgaatctccttctgagtaaattacattgttcaatgcagcattttcagacgattcatccccatgtaattcgtcctcatgtgattcatcctcataatcgcctgcactctcattctcctgctcatgcggtgtgatgagaaattcaaataccatatcctcctgcgccttattaagctccatatccttaaaataagacatgatttcatctctgcctatcggctccgctgatgtcctgataatctcggccacgctctgcactgtctctataaaggtattctggtctaacatattttacactctcctgtctgattttcaaaaactacataactatatcaatccctgtataaaaataaacaaaattaaaagcggcagtatgaactgaaaatacggcttaagcttccttgaaatcttaagtcctgatcctgtatttgcctcatctatatacttatcaaagccccagccccactttgtcacacaaaaaagcagataaaccagtgagccaatcgggagaagcagattgcttaccataaagtcctcgctgtcaagcacatccctgcctcctatgaggtgcagattactccacacattgtatccaagtacacacggcatacttgcaataagtattatcacaccatttattagcgcagccttgtttctggaccagccaaacatatcaatggcaaacgacatgatattctcaaataccgcaataacggttgaaaagctggcaaaggtcataaacaagaagaaaagacagccccatatgcggcctccctgcatatttacaaacacatttggcaaagtgataaagataaggcttggtcctgcgtctacctccaccccatagctgaagcaagccgggaaaatgataaggcctgacattatagccacaaatgtatcaagagcacatattttggcaccctcacctgcaagagtgcagtcctttcccatatagctgccgaatatctccattgcggccacacccagactcagcgtaaaaaacgcctgattcatggctgctgttattacattctttattccaatttcagagaccgcatccagatttggaacaagatagaatttcactccttccaaagcccctgaaagtgtgatactgtgcaccgcaaggacaatgataagcaagagcagagcactcatcataaatttactgattttctcaagcccattctgcagaccacggctgcacaccaaaaagccaagcacaaccgtaactatcatccagaaagccatctgcttggggtctgcaagcatgtttccaaatgcagctgccgtgtcatcagtattcatgcctgatgtaaaatctccctttaggaatttaaagaaatacgcaaccatccagcctgagactgttgtgtaatacatcatgagcatgtagcagccaagcatggctatccatccgtgaatatgccatttactgccctctttctcaagagccttgtagctcatcacagcactttttctgctggctcggcctacagcaagctccatcgtaagcaccggaagtcccatgcataccagaaatataaggtaaaacagtacaaaaataccgccaccgttttgacctgtcacatacggaaaacgccatacattgcctatgcctatagcgcatcctgcacttaccagtataaatcccagacgtgatttaaatgattctcttttcatatttatatatctcctattgttattgcgttacgttatcaccctgctgtgagcatcgactattgctttgtgctttattactctcctcaaagactcgcagctcctttattgcctgtccacccatcagatagagaatacctgtattgaatatagtcataaggccgattcctacatctccgagatcccagacaaatgtgtatgccgcgataccgcctacaaacagcataacaagagccagcaccttgtacatggtctgtgaaatccagttatccccaaacaagtacgcaacattactccttgcataaaaaagtataccaaggaaggtggaaaagctgaataaaaacaatgtgactgctataaaaataactccaaaatctccaagatgatacctcatagctgactgtaataaatccatgccctctttccctgccactatattctccggtgcagtgagcatgatcattgccgtacagctgcaaatcactatcgtatctataaatacaccgagcgcctgcgtcagtcctgcctttacaggagtatcgcactctgccgccgcagcagcgcatggagctgagcctgagcctgcctcatttgaaaaaagacctctctttacaccgttcatgagcaccgctccaaagcctcccgcagccacctgcctgataccgaaggcttcctcaaatatccttgaaaaaaccgatggcatcatgcctatatttttaattatgataaaaatggttatggcaaaatagcacaccgccatgataggaacaactatgtccagcacctttaccgtagcatttttcctaagcacaatgacagcggccactgcaactaaaattacggtagtgtaaataggtggtatgccaaatgcattttcaaatgacgatgtaactgaattgcttataacctgacttatgccacaccagcagattagtccggatatagcaaacaaaacagctataataacatgttttttctttttgcctgatttatcctcaaagtaatggtgtatgtaatacgccggacctccacgatagcccgagtacagtggatccggctccttgtgaagctgtgccagtgtagcctctacaaaagccgtggatgaacctataatggctgttatccacatccagaaaaccgcacctgcgcctcccactgatatggcagctacaacaccaaccagattacccatgcccactctcgtcgccgtagagacaatgagtgtctggaacgtggacaggctgtccttattttcctttttacctgtcagcgcctttatcatgtccggaaacattctgattggtaaaagtcttgtccttacagtgaaataaattcctgtcggaatcaaaagaattatgagcagtgagattcccacgctcccaccgccgggcagtggaatgtgtatcagatctccccacaagaaagaataaactttttcaataagtgctactatcatagtaaatatcgtccccttagttttcattgcttcaacgcattgaagatgaagccagtattactatgatacaatatgagcaggaaactttcaatatattctgtttttttgttctgttttttctttcacaaacagtaataaatacactataagtcccttgcatatgagattataatttcttataatgatatagttgaatattcaaaagatatacgccctggggagataaataatgataaaactaatagcaacagatatagacggaacacttgtaaaggacggctcactgctcatagatcctgagtacatgtctgtcatcgacaggctcatagacaaaggaataatatttgtagtctgttccggcagacagttttcaagcgaatttaagctgtttgctccgataaagcacaagcttttgtatataacagacggaggaacagtcgtgcgcactccaaaggaaatcctaaaaacctatcctatggacgaggatatatggaagggcatgtgccggatggtccgcgatgagcttcctgcatgcgattactttgctgctactcctgatttctgctttgcagaggatggtggcagcccagtctttcacctgcttcgtgattcatacggctttgagatgcgtgaggttgatgacatcacaaggcttgacagaaatgacatcatcaaattcactgtctttcatcccgacaaatgcgaagagctgtgtacaccggttttcattccggcatggaataaaaaagctcacctggcagccgccggcaaggaatgggtagactgcaacgcaaagggtgtcagcaaatggactgcactctcatacctaatagacagattcgaccttcttccggacgaagtatgctgtttcggtgacaatctgaatgatattgagatgcttcaaaatgccggtataagctacgccgtgtcaaatgcccgccaggaagttatcgcagccgcaaaacacacctgtgcgccttactgggaaaacggagtacttagtgttttaaagtcttttttataatttttttaatttttttaaaaaaagtacttgcatttttgtaaaaccctgtgtataatatcatttgtccgtgtgacacagatattcacacagatgtttgcgcttctagctcatttggtagagcacctgactcttaatcagggtgtgcagggttcgagcccctggaggcgcattttttgtacccaaattaatttaccaacactttaaaagaagccggatttattccggcttcttttttacatatctctgtttatatacatctgtttttactttttatttgttttattatccaaagcagcttcaatcgcatcaatcacaatcttaagagccttgattctcgcatatttcttgtcgtttgactcaagcacatgccatggtgcgtaagtggtattggttttctttagcatctcatttacagcagtctcatacagatcccatttttctctgtttctccagtcctcatcggtaatcttccattgcttttccggagtattttggcgttcctcaaatcgagccagctgtgtatccttatcaatctgcacccagaactttatgatgacagcaccccagtctgacagctccttttcaaattcattaatctcattgtaagcacgctgccattcattctcgctgcaaaagccctctagtctttctaccataaccctgccataccatgtcctgtcaaaaatagctatatgcccggtcttaggaagacgattccaaaatctccacagatagtgtctggctttctcgtttggcagcggacttgcaatcggatgcacctcaaagcctctcggatccagcgcccctgtgattctctttatatttccaccctttcctgctgcatcccagccctcatatgctatgacaacaggaatctttcgcctgtatagcctgttatgcagctcgctaagcttagactgcagatttttgagctcctttttgtattcttcctcagatagttccttatcaagtgatatctcagaaagctttggaatcttctcaagcgggaacacattctgtaacagcggcacagcaagattactgtttttaagtgctgtctctattccactaaccagcgtctccagcacctgaagctcagcccattttctattctttgcatcaactatataccaaggatctgcaggcgaatttgtatcattcagatatctgtcaaacacatgcatacacttgtcataatgcttattctgccagtcttcatctccactgacacgccatctggtatccttattctcctttaatacctcaatacgctttttttgttccttccggctgatttggaagaaaaatttcataacaagataaccattgtcagtcagctgtcgctcgaagcgcttcacgctttcaattttcttcttgtactccttctctcctatcctgtcgtgcagtacatcctttacaacttcatccatccagcccgaatcaagaaactcaagcttcccctttgccggaatctttacaaaataccgatataaaaaaggcttgcgtctttcctcctctgtcggctcgtccatggttgcgaccttgaaaaatcgcggatcaatattcttgattaccttaccgagcacactgccctttcctgcagtaccccagccctcaaacagcacaagtacaggcagtccatgctccttaatctgcatctgaagcacagacagcttagagcgcgctgcatgcaggcgctcatccagttcttcctcctccggaatttgtggtttaatccagttttctaacacgtaattacctcccaaatatataatttcagccataaaaccgctacatcactatattagtatagcttttttcaggctaaaatacaatcttcacactatatttgtttcaggtatgtttcagttctctgcttctccaatatttgtcattttaaagccctctccgtgcacctcatgagactcaacaaccacaataaaagaatccgggtctgtatcttttacggatttacgcacctggtacatttccttactgttgcatgcacacattaccacctgaatatcgtcctgcttatatcctccctgcgccttaagaatagtgcttccgcgctgactgcattcatcaattacatcgcatattctctttccattttttgtaacgataaaggctactttgcctgaattcatgccatatatcattttatcaataacaaccgcagacagtatattcactatcatgccgtaaatcattccgtcaatatcccgaaacaaaagtcctccaaccagaataattccgacatcagtaagaaaagagatatttcccatcgataaatgaggccgcaatgcttttacagccatgatgataaaatcagctcctcctgttgaagaatttcttgtataaatcatggcatagcctattccgcaaaatacacctgtgcacaatgccgcaagcagtctgtcgccctgatacaccggaaataacggcgcaacaaagtcaacaataaaagaagacaaaagcatgcatcgtattgagctgacaaaaaatttcctgcccaataatttgcagcatagtatcgcaaccggaatattaagcagaaccgttgataaaccaattgaaatattaaacagccggtataaaataattgaaatacccgaaaaacctgtcataggaaactctgcctgcagagcgaagttatatatacctattgcataaaagatgcttcccgcaagctcccacataatctgtaccaataattcttttttcttattcatattgcatctatcctccaaaataaataagcgcccggaaacaaatcttacagtgtaaattactgcacctacgatttgctcccagacgctttaaccactcatccggtgaagagtgaacgttttctgatgtatgcaattattatatttgagatgttaaattaagtcaagccggaatcatcaatttttcagatactacttcacaaggtatgacagcacatcacaaactgctgtagaaaccagtattgcaacatacactcattatttctgcataaattcaaacactgcctctttcgtcggaatcgcaggtattccacctcgcttttgcacacacaatcctgcaactgcatttcccaaaacagcacactttctgatttcttcccattccatcttttctacgggcttatttatagaaagaatactgcataatacgcctccccagaaagaatcccccgctccggtcgtgtcgaccgcatgtgtctgaaatgctttgatgatttcttttctgctttttgttgccataagaacgccatgttctcccaatgtaatggcaaccagctttggtcccatagcaagaatttcttctgcagcctgctcataacttttagcccctgtcaggagaatactctcttcatccgatactttcatgacatctaccagttctacaacagacttcatttttttcactgcatactctttgctcttccaaagagacgggcggtaatttggatcatatgaaataagtacccccgctgcttttgccatttttactgcttcgatcgttgcgctttctgccggctcgtctgtcagcgataatgatccaaaatgaaaaattctgcatccggaaattaacatctgatccagttcttctttttttaactgtgtatctgcacccggttttcttgcaaaagaaaaatttctttctccattttcaccgatttccacaaatgccagtgttgtaaaataatccggatcttcgacgatagcatctgtattgattccttccgtttgaagtgtcctctttaaaaatttaccatgcatatcgtttccaacttttccaataaaagaggtgcgatacccaaaatgacttgcaactgtcagaagatttgccggagcaccgccgggattctgttcaaacagttttctcccaccctgactgtgccctgcttccgtaaaatcaatcagtaattcccccaatgccacaatatcaactttttcttccatttttcagttcctccacaatctcgttataacgttttttatttaaccggtagaaaaataatacaaccgcagtcacaatccagagtgcacccggaatcgtcgtaaatgcatgtttcataattgaaagtacagttgcattttgtgtctgatttgcaatataaccacattttccaagtaatcctgctaaaagtgctgttccaattgccattccgattttatttccaagtgaaataaatgcatactgaaaaccgtcatttctaagtccggttttccactccccatattccacacagtctggaataattgcatagattgcggtattaaatccagagaaaaagaactgtgtgagaccggataatgcataaaaaatagccggtgactctttggcattaaagaaaaacatagacaacatggaaattcctgtaaataaagcaaagagagatgctgttcttcctttgttattcaacttgcggaataatggttgaaaacaggctgcccctatgatagaaggaataatgatgcacatcgaataagttgtgtagtaggaggcatttccttccacatatgtaaaataatacagaatatccgcgtttctgccatataatgtaaatccaaataatatctgtcctgccaatgcaagaagatatggtctgttctgcatgactgctttcaactgtatctttacagaaattttttctttttccggaataatcactgcctctttcgtcttcgcaaagcagaagaaatgacaggctgtaaaaatacatccatatatgaccgcaaccgtcagatatcctgtctttgcactgtgactgccgaatttgctgagcagtggaactgtaataatatttaacacaccaattgcaatcatagctgcaaccgaacgggatgtatttatttttgcacgttcatcaatatcctgtgtcatagcaccacacaaggttccatatggaatattcacacaggtataccccaaaaccagcagacaatatgtaattaccatataaatgatttttccattctgtggccagtcggctcttgcccagaatgtcataacaagaaggatcgctgtaattggagccgctactaacagccatggacggtaccgtccccatttcgattttgttttatccgtaagccccccgacaattggatcattgattgcatcccagaatcttgaaaaaagcataagcgctgacacagccgccatactgattccgaacacgtctgtataaaatatcatcagaaaattacttacgaacatccagctgaaattacatccaacatcaccaaacccatatgcaatcttactgatcagcggtacttttccatttttgttttcgctactcatatgtccctcctatttttatcagagtttctgacaaaactctattctttcctcatttggtcccttaatcataaaaaacttcacacccttttcccaaaatggcagttcttcgattccatctgtaataactgtgtatttttcattgcagattttctgatacatactttcaatgtcttccacatcaagtgctacatgttggtatgcaccgtctgacattgccgcctgcccattttcaaaagtttctatacagtaattttttatctgtaaaaatgccactttttcccctgctttttcattatatgtctgcataattacttcgaatccaagactcttataaaactcaactgttttctgtaaatcgtttgtcgggagcccgacatgggctactccgacaattccatatttatttttcatacgaactccttacttttcattgacgttgataattactttcatcgttgtctcgcggttatcatcaatatactgatatgccttcagataatctttaaaagcaaatgtctttgagataagcggtttcaaatgaacttttccctcattcaccagtctgattccatctatgtaatcatcatggcggtacatcatcgtgcttttaatgtcaagttcgtgatcatttgccactgcaagatctacttctgccattcctgcaaaaacagccaccagtacaattgtgcttccttttcttgcatatttaattgcctgtcccattgtgatattgtttccggcacagtcgtagatcacatccgccttatccggtccaaatgcttcgatcattgcctcaccgaagtctttatttttggtattcacacacacatcaattccacattcttttgcctttgccagtctaagatcactgatatctgtgatcatcactttcgctgcccccattccttttgctgcctgtgccacgagatttccaatcggtcctgctccaaggactgcaatattcaagccagccacatcgcccatctgttttacaccatgaactgccacagcaagaggttcgatcatagctccttcttcataggacatatcttctggaataggtgttactttagatgcatctactgcaaaatactcagatgctgttcctgtcgtctgaaatcccattacttttaattcctcacagagattatactttccatgacgacatggatagcaatgtccacaatatacctgaggctctatcgtcaccttctgtcccacatgaaactctgtgacattttttccaagttctgtaatctcacctgaaacctcatgtccttgtgttaccggatattttgtaaacggatgttttccatgataaacatgaatatctgatccacaaataccaatattcataatctttaccaaaacctgattttcctttacctccggaaccggaacctctctgaaaataatttctcccggatttgtcattacctgctgtaacataattgtttcctccttttttatgttgttttattttatgttttataaattattttattaaagtaattacattattaccttgtaaacacaatttgtcaatatgttttttcatatttctatatatttcataatttcaaaatctattttttgtgtatttttcacaattaacatgcaaaaaaaacggaaagaaaaccgtagttactgttttctttccgttttttactataatatgatatgaggatcaaaaaatttacaattcacccatatgttttgtaaaaaagtatttcgcagctccaacagctgacgcttctttcttatacgaacaattttttaagtatgaaacatcatgctcaaagccattatatgccatcactttttctcccagaggtatcatataatctgataatacacctcccacatcacctcctagtatgatatccatatcatatgccatccgcagatttgatatcaaaacagcaagatgatccagatactcattccatgactgcaaagttttttcatcaccactttcaattttttccataaatgcatccagtgactgcctgttatcttgtgtcagtacacttgcagcacaatatgcatctgcacatcctgatttaccacaataacactttcttccaccgggaacgagtatcatgtgaccgaactcccctgctttctggtttttccctcgaaacagctttccatctatgcagaatgcacctcctaaggtgtggttcaaagacagatatatcgcatttggatacttttgttttttttctgcaagcattgcagcattagcatcgttttcaaaatataccggaatttccagagcctgttctaaaaagcgcagactataattctctatacctaaagcatgggattttaaaacgatccgttctttctgatcaataattcccggaatcgccactccaatcccaagcagcgtatccttcgctaattcgccttcaagaaaagttttgaccttttgtgccacctctgtacaataggataattctgccgtaaattttaagcggatgcgatctttttttataatctcatctccaagatttactaataccatttctatatgattcgctgtaatcaaaattcccattgcatgacagtatgacttattaatccctatactttttgccttccttccaccggttgaagcatattccccagtttcttccaacacccctttttctaacaagtcattcacatttgctaacaccgtcggcatactcaagtttaactcttttgcgattcccgccttggatgtaacatgattgtttagaacataattaattattttttttcttgttatattttttttatctttattttccgttttcttatcctcttttattaaatatattataaaagaattatatgcttttttatccttcttgtaaagtaatgttctataataaaaatctgctgcattcagaaatactacttttaagaatcaaatttaccgaatacccactcactatatttttcattcacgttatctcatcataattactgttgtaattctttgccaaaatggaaattcaattttacaactttccaaacattcactcaattccaactcaatttccccacaatgcctttttcctccaattttcgtatgcttatctcacagcaaagcagtaccacaccggtatgacctgctaaatcaatcaatacgaaaacggaggtattttttatgcgagaactcagaaacacaaaaatcatcgctgtagatcatggctatggcaatatgaaaacagcaaacaccgtcacgccaaccggaatcaaagcctatgaaacagaaccactcttctgcatcattccatatttcccatgaagaatgttgtaaattagtactatccacaacgataacaggtaatttaattattcgtattttttcccgatagtgtaaatcgaaactaccataccacctaatatcataattaagaaaattttattcaaaatatcccataaagctatattgaaacaattgattattataatacctgcaagaggatatagaacaaccgttgcaagtgtccatatttttaaagttgtgcagatgcatatccaatttccattgttaaaagataaaccaactagatgtatcctaaaaattccttgtgaaacataatttatcttgttggcatcataatatgttggtaatatgtcttttgcaaagaaacaaaaccatgcaccaaataaaagcattcccccggtaaccagcaatatatcccctttcatctcagccaacgaacttccagatacaactaacataataatttctgtaatagatataaaaaaacataacaaatatgctaatatccagttttttctatgctggtgaatagaatccctaacagccatatcgagagatcctacttccaattcctcgatttcttttttatcaatatttttctgtgtatctattttttctccacttaacaattctgtaacggtaacatctaatatatcagctattggtatgagtaatacgacattgggcatactaagaccacgttcccatttgctaacggttttatctgatacatatatccacctcctgcacacatattataatgagagcgtgcataaatcaatcgactagcagtagaattgcagaatattagcacacaattcatcaaataatttccacttcatcctctgcaatgtcttctacgcagataagattcactctttttcctgcgttttatttcaagctgtacacattcccatatccgctttgaaatgatggcaataacgagaatacacataatacagcatccattactgtccctctccatactcatcttgtttggaagaagcggatacaaagaaatcacctcgcctgactgaaccaagcaaactttttatacccatctgctatccctctctttctttttgttcctgtctgtgataaagttgattccatagatatcgaaaaaagttcataaaattttagcaattaaaggcattgattttttgctgtaaattgcatataataaagacacagatagaaatatctgtgcagcggttagagcatccatttaaaatgctcgtttaaaagcggttagattgtccaattaaaacaatcggttaacagcagtgggtggagtaatccacccgcttttttacttttcaggaggctctatggattggtacgttgtcgacaaaaaatacataaattacctgacacagtttgattcccgtgtcggatatgtggagtatggggaacgtttgaaactccatgtcggaattcttcttactatcggagatttccactactatgtccctatttcctctgcaaaaccaaaacaccagaagatgtccaacagtttggatttccacaagctccaggatgaatccaccggatatctttatgctgtattgaatatcaataatatgattccggttcctgataactgtcttactcagttaaaatataatcaagtagaaagtttccgttctttcagcaatgaaaaggaaagaatcgactatatttaccttctccaaaaagaaaaagctctaatcgacaatgttcaggactcgctacaaaataaagccatgaaattatatcagaaatgcattgccaagccagattcttcccttgctgcaagatgctgtaatttcaaaatgttggaagaaaaatgcagttcttattccgatacataaacaaaaccacgatcattcaccccctccatttccctttggtgtgcttcagactagcactcatacataaaagaggtaattcaaacgagtaaaggaaccagctaatccgttgtgattctggttcttttcttttgttgctttttctaaatcttacccttgtaatatttcaattattacgcaagtaggatttcaagccaatatcttttttctgaaattgacaattatctttatacaaaaagactcctacctggaggtatcatacattttcgcaaaagtgataccttttagcaaaagcctattattcagcagagtctccccccctctgctacgatattcaaatgattcattcataaagctacaaaacacacatccattttcgctccttaatatcccacaaaccgcagaaaatcaagttttccttgaaagcagacaaacgttttcaatattcccctgaactttgattttatactgaatagcgaaagtatgcaatagatttccaaagttggggaaaggttttatccccataaaaagcggttgattaaatgaattttaggattttcctatataaatcccacagcctcggtccacaaaagccacccaaagcactcaacccacgatgctcatgaacatctctatcttcaacctcaaagagtcgatggaaatcatctccttcacctacatagactgatttgtcataattaagaaaagtagacttgccactaaattggtcacctgtaatatctataataatatgtttgtctaccatcagccacgcatgagattgtccgtttccatccggtttaccccaatatgttccgcagacataatctgttttgatacctttatccaataaatactgagctaacaaatcactcgtatctccgcagcaagcacgtggaaatctgcaatatatgctgtcgttatcaaactccccagcttccaaagccaaatcaatcgctcttcgaaattgggttgcaaactgtttaatttccttcatcatacgctcctttaacaaaacaacttttgcgaaaaagtgtccttttgcccaaatgtatatttcctattctccaaagcctatcccctgggggtaaacctcctgttatatcctcactctacggaaacagaaacatacatctattttattcccaaaatggcgaaatcctttgatttattaatcttttcttgacagaaggcacatagtctcatctgtactttcgttgtcccaatccactcctagcacatttctgccattcatatatatcggaaatttaaaccatcatattctctgtcaagctctgatgtatcaatactgccacctatcagctttctgatttcttcctcaaactttggattcttcacaaatttgcggataatttcctcaactgccgcattaatcctgttccccatattcatcagttccaattttatctgccataagcacctctccaatccattacttcttagttatgaaatgtgaacacatgtattcacatttgtcccaactaaatcttatcatcattccaacctctgttcaaccaaaactttttccattatacaatgcaaaataaaagagactccactcgccatgaatgaagcctcctgatatatgtatacatcatacagcagcgctcaaaatccttgttgctatccctgataccttattctttcaaccagcgtttcctttttcagattactgcttaaaacgcaggaaagtacaatctgcaacagaccgaccaaaaaaatcataataaaaattggtacgattggaacatgatagatattcattccaaatattccattatgttttgcatagaaaaaaagtacatagccgagcggcagaccaatgatcaaagctacgcatatggtaccaaccgtaaaaatcagtccctgtaactgcaggcataaatttaattgtttatttgtcatacccacagcctgtaatataccatattcctgcttttttgtcgtaatattcatgatcatggtattcgccatattcataaacccgatgagtcctacaatagccataaacagataacagccaagcttcatcatgctacttgcaaattcggcagattgtaactgcgcatgataagtatccatttttatatgcgaagtattagaaatcaaagtattcagcctttgttctacagattttccagttctgctggattttccgttttcagtaaagcatcaaatttattttcgcggaatctgatcagaatttcttccaactggtctaaaattttctgatgacacacatcttcttttttcttccaataaagtaaaaaagtcaaaagaagcacgcatattacagtgcttatagcaccggtcaccataacctgatgccggaattgcgaataaaatgcattccctttattcccccagtatccatattgctccaataatcgccttccctgttcgttagtttcaatatccttatccttaagcaattccgaaacagcatccagcccggaaaattcttcctttgcagcaatgtctgtcataagattcattttatatttataatctttataaaacacatacgtggtaaagcaatttaatattgcaaacaatactatgacaggcaaaaccaaggagagcgctgctgtaatcttcttgcgatatctctttgtcactgccttacctcctgattccatatatacccaagacctctgatattctttatatagaccggtgcagccggattgtcttcaattttctcacggagtcttctgatattgacagcgattgtattttcatccacaaaatccccttccagatcaaacacattttccaatatttgtgtttttgaaagaatctgtttcggattctgaagaaaaaaagtcagcattttcaactccgtttttgtcagactgatttcacggctctttatcaggactttcatttctcctgcgataaatacgatatctcccgaaattatctttccggcttccgttttctcctgtctgcgacggaaatgtgcttctattttcaaaagaagtaccgaaagactaaacggctttgtaatataatcatctgcccctgcttcatatcccatgacctgatccatctcctgatctagcgctgtaaggcaaataatgtatgtattataattgcatctcatccaccttacaaattccagtccattcccatccggaagattcacatcacaaatggtaacatccacattattatcacttgcaattcttttcgcttttttcactgattctgccgaaaaaacctcatatccggattttttcagtgagaatgtaattccacgatttaaattttcatcatcttcaaccacgagtatacctggcatagcatatgcacctctctttattaactattcatcttaaaatgcttcaattctggcattatgttcagccacatacttctttgtcatagtcaatggctgtcgcatacaggtctgtaatcttctgatagaactttctttcgctggcacgaatctcacggatacgctctaactgctcatcaaaatacttctctgtcagatacgttcctcgtttcagccgttcatcatccatcacccagcctttaatggtgtagtccttggcaatctggcttacccatttacgaaactgtacggcacgctcggaattgaccttgaagcctacggcaatgatcatttgaaggttatagtgtttggtatcgcgtgtcacctggcgagacccttccgtttgaactatccggaaattccgaatagttgccgtctcttctaattcactatctgcataaatttttttaatatgttcatttattgtcggtaaaccaacatcatacaatgtggccatcattctctgtgtcagccatatattttcatcctcatagcgcatctcaacactgtcctgctgatcaccaacagaggcaacataggttaagtattccgccgcgctagagctgatagttatctcatcttttttctttttcaacttaatctcctcttattgctttctttttttatagtaatacctgctcatcctttgccactggaatatacacattatattatcctacaaattctctgtcaattctcgaaaaccctttatagctcatatgattcatttgcatatactgccacagatggcaaaaaatataatgtagattactataaccttgacgtcattatctccgtcggctaccgtgtgaaatcccatcgaggtacacagtcccgtatctgggctattggaatcataaaagaatacatgaaaaagggatttgcattagatgatgaccgattaaagagacttggcggaggcaattactttgccgaattgcttgcacgtatcagagacatccgctccgcagaaaaaagtattttggagaaaggttcttgaaatctatactaccagcattgattataatcaccatgctgaaagctctgttcttcaaacaggttcaaaacacaaagaaccaatgtatatgaaagactggctggaaaccattgacgattgattatctgaaaatgacccgacgtgatattcttaccagtagcggtcgcatcagccataaacaggctatcgaaaaagctcatgcagaatatgataaatataagaatcgactggatgatacactctctccagtcgaaaaggattttattgaaaatatcggtatgttagaacaaattacagacagttcaaagaagtagtgattatgaagtggttgcccttgctgaattgtgaatatctcttgggtgttaaaaaggaaaaataagcagtgatctgaattataactcacagaccactgcttaaatttttattaaagcgataccatactccccatcttcactattttcaaatgacaacagcaacattttccccataactttccacctccttaaatcttacttatgtaatattttaattactcaaacttcgcacgtagattttagctatgcaccttgaaaattcaatacctggcagttattcagttgtcaatgttcagaccttaagcagcttggagttttgttttcaacaatgcaggaagtgcatccataaatacattcgccaattcatcgattttttcgtctgaaagttcagtgttatctgaaagcattgttctgaacatttggagcagcatttgaaaagcctgtatccatgtgatatcagacatttcgtcagaaaagtataaaaagagctccccaagtgaccggttatcattggattcccggctttccagtgacagcatcatatatcgggtgaaaacaactgcggtatgcgcagtcattgcatcataggacagagaattacattctctgctcaagttaaggtagcttttgcataccttgaaaaatacctctatatcccagcgttttccataaatccggatgatttcattttcatccagatttacatctgtggaaatgagacagagatattccttgcgtttgttgcgattgcgaacataaactactttggcaggaatgatgtccccatccttcactacatcaaccataacagaaagcagatattttgatttgcctcgtctctttttatttttgttgtaaatggagattaaagacatatcttcaccatcgtagcgaaaaaacatttttggagattttttcaccattccgattacatctaaatccattcttttgacagcatgaaaggtgcttggagatgaaaaccagctgtcaaaaagaacatattttgccggaattgcagcttttttagcagcttccagaagtgcaagcatggcatgggttcccttttccatagacagctttctgcgtctgtaaccaacggttcttttgtctatctcagccgcttcattgatacgattctttttgttttctgtagaaagaagaatgctgtttaccggcaaaaatgtactcccatctgaccatccaagagtaagcattctaaatccgaagcgatatttatgttttgcgtggtcatagacctttgcaagaagctctacctttttagaacggttacgttcaaacatggaatcgtcaataataagaacattggcacggtcttccgaatccagtggaagaatagcgttgtttatgattctggatgcaaggattgtagtaaaacgcatccagttaatttgaaccatcttcatgaaacgatacacggtatcttttgcaaaatcaggagtattttttcctgtaagcagactcatatacatacttctgttggagaaaatcagcagaaacatgtattgaaaaatctccgttaccggagtgcctttccttttataggcattggcagctttcaaggctgaggaaatatgaaaccttgtgaaaaatcgtttgatagatttagaaatttgcttatcattttgagtcgcttgtgttatacttttatccatagcatgagcctccggtttgtaattgtttttggcaactcaattatatcaaaaccattggtttcatgctatttttatgccagttattattgaattttcaaggtgcataggcacattttaatgtgcgaagtttgagttaattattatataagtaagatttacagtcaactatttttccaaaattgacatttcaacaaatacagaatatactatttttattacaggcgtaagatttaaggagtgatttacatgaagaatttaccacaaatttcggaagctgaatatgaagttatgaaaatcgtatggaaacatgctccaattaacaccaatgaaataacagaaaaattactgcagtccacaagctggagtcctaaaacgatacaaacacttattaaacgtcttgttactaaaggtgtactcacttatgaaaaacaaagtcgtgttttcgtttatactccattagtaaaagaaagtgaatatatttgccaagaaagtaattcctttcttaatcgttattatgacggggatattacagctatgttatctgcatacatagaaaatgacaaactgacagaacccgaaatagaaacacttcgctcccttctttccaagagttccaaaaaaggaggcgattaacatggctaatttcatgatacgctttttattatgcaatgtatttatcagcggtatcgttggaattcttttgatagccaaatgggtattcagaaacaacttgtccagccggatgcagtataatctatggttgctgttactcggacttttagcagtgccttttatccccttccgtctaattagttttacgcaaattttctcatggctcagtagcgtaagaaactcttccgcttttcatgccgatgttggtgcaaataatgttatggataccggtttatctgatactacaaattggatgaatgactttgccctttctgtaaataaagacacgctatcagttaccggatacattttattaggtatatggattgtgggaatgcttgcgatgatgatattggtaatcaaatcttctcttcgtttacgcacaataaagaaatctgcgctcccccttcagaactcagaggttcgcagactgtataacaaatgcttgaatgagatgaaaataacaaggaatattcctgtgtacagtaccgcttttttgaaatcacctattatcgtaggatttttgaagccatgtatttatcttccaattcatttaatctcagattatcacgaatctgatatgagatatatgctattacatgaactgcaacactacagacataaggatgccattgccaattatcttatgaactttgccggagttctttattggtttaacccctttgtctggtttgcactaagagaaatgcgtaatgacagagaagttgcctgtgacacttctgttctaaaaatgcttaaagaggacgattatgaagattacggaaatacgctgattaactttatagaaaaggtctccttttctccttttccttttgccgccagccttagcggaaacatgaaacaaatgaagcgtcgcattatcaatatcgcctcttatgagaaaccaacgttttgcaagaaattaaaaggcatgactgcttttatactgaccacagttctaataatgggacttacaccttttatttctacatatgcagcggacgaaagtcgctaccaatggaaatcttcctcagaaaatatttcatatgtagatttttctaaatactttggaaaatacgaaggaagctttgttttatacgatcttagaaatgatgtctggagcatacatgatatagaacatgctacgctacgagttgcgccggattccacttacaagatatatgatgctttatttggattggaagaaggtgtcattacaccacaggattcttttattgcatggaatggagaaaactatccgtttgaagcatggaacgctgatcagaccttgcagtctgctatgtcttcatctgtgaactggtacttccaatcagtggacgaacaacttggtactacttccgtttacgattatatcaaggaaatcggatatggaaataagaacatgagcggtgatttctccacctattggatggagtcttccttgaaaatttctccaatagagcaagtcgaacttttaacccagctgcagaataacaactttggatttgctcctgaaaacatcaatgcagtaaaagattccatctgcctttcttcttccgatgccggaacattctacggaaagaccggaaccggacgtgtggatggccaggatgtgaacggatggtttatcggttatatcgaaactgcagataatacatacttttttgctaccaacattggtgcagacagcgatgctaccggaggcaacgcaactgaaataaccatgtctatcttgtctgacatgaatatctggaaataaagaatcgggtaaaggtcaatctctgacttttacccgatttttcttaattcgctatctgaacaagccctttgtattcccatgtcgctccataatcagttgactgaaatacaatcccatctttctccgctgcatctgtggtaaccgttatcgtcaatgtgtcgtcctctttttcaggcatattcaggtaatcaaaatcctccaccgtaaatccgcaatcgatagcgatttgtggtaattctgaaacaagatccattggaagtttcatttcttcaaaggcccttccgccatcgcgagtgacatataagcgggaataggactgggatgcgcctgtaattcctgcaaccccaaagttctcatcataaaatattaaaccttctgcaactcccaattgtccactgaacggatcatcatttatgcattcccaagtagaaccaccatccattgtcttttccattacataaaatctgcttccggcagctgcatccgttatcaccaaacgccatccattattttcatctaaaaagaaatacatagttccatcactttgatccacagtccaactttctgtatctttagcatcctccacctgctgcatcgtattctcctgcttcaattcttgttgactgacgtactcaggctccataatatatcgaacaggtgtgacactatttaaatcaggaatatgcaaagatacctcaaacccaacgatttctccaccgcttctaagctgagtaaaattgccggttcctgtttcagttccatcaccatctgcatctcccgaaatatattgtaagccttcctctgaactaaaagatcttcgccccatatagagtatttcataaatctgctgctcttcaaatgtttcagcccacgcctctacctgactcgtccagtctgaattgttcaaaatttcaatcattggagacaaacgcatatcgtcactatattctccattcacattaccatctatccaaacagtcatatcattactgctgtctgcgtcataatcaataagatacgtttttttctctccagcctcattttttccatatatgaatgcataaatcctttgaatcgttccgttttcatcaaatgacacctgatatttatttgcaatatagagttcttccggcagttgcaatgcttcatccaaatccatcagaatcccttctacaccatcctcaaaaagattattatgctccagttctacttcttttttacgcatccactcatcaagtttccaagacagtgccccgtgatacggaactgcagaataaacgatacgtccaccaaagaataaagttgctgctataaggagtatcatttccgtatagaaaagtttcttatttccattatctcctgaattaacttcttgattatgccttttcgaaatcagccagagaaccactgtgccaaccaatcctattatacctaacgccaacatcggtatatgccttctcaagccaccatattgacatagatgccagaattgatacaacataaatatatatagtattaaacttacttttcccgtgattttataaatatatttcatgtaagtctcctttcttcatatctgtaaaaataccataaaacaccagtattatcaaatcattctttaatacggtattggtaatctggtatatgcataattccatcatcaaggatttcattccccaaatattgaaagctaccatcatcagcaaactttactgtaagttcatgggttatgaccgcatcatcacaaatgaccatatcacacaccgcatccaccgttaatgtcactgttccatcctcattttctttgatatcaataacctccggcagcgaagttccaaaaaaagttggtgcatagttaaggcagccttgtcgtacccatacgtaagtctgatttttttcatcaaataccgcatattcctgaatttgctctgctgttaccggaagatattccatgatcaaactctcaaattcttcttttggtattccatttgaataatcctctgcatcaaacgctttctgatgtttcatggcatacagatattcatacattccattatagtccagtttttccatatggtcagtatcccaattcgagcataaaagattatttccctgataccccagaccttgtacgcatctttctgacatttcccgttgttccttagataatggctttattcttaccagacagcttccgtcaacaatctctgtaacctccggtggttccggaacacataattcataacaaaaccatcctttatccgtatatttccactcctttatccttgcataagaaatataggacaatccatatgtatcattggtgttccatgtagcacacgcacttattaaatacatgtcctttccatcaaaaataaatttatctctgccaatgccaccatctgactgcaactcgtaaagcactataaaaccagctttctcttcctgacagtttttaagaaaatcttcgacttttttataattttccattgctgcatatgctttcatcgttataaccggataccctttttcttttatccgatcctgcattttatagattgtcttatcatccagaaccgtattaactgcctcccctttatctgcctgagtataaatatcagaaataagctccagaatcattttacactcatcctctgcttcttttctttccggctcatctattggaaggtcataacctttttcccactgttctgcaacatcttcttttgcattctcgttttcttccgtagaatcaacatctctactatccatcaactgactatctgatgtcatatctttccttatgcatccacataataaacaactgatcagcacaatgaaccaaatacgctttttcataaatatcgtcctttccattcagtcacatcagggattcatcactgttctccgtatatatcattccattcatcttcagttaaacgcggtgtatgccatgtaatgttgttattttcttcctctgaaacaatgtaatttgatacatactggaatcccccgtcagataatggtctgaccgtaacatcatgcatatatacatttgaatcgcctgcatacggatatatcacatgaacgttgagcgttatcgtcccatccgaatgttctttatacccaaccacctcggaatacggatattctggatactctatctcataaaatcctcttggtttatattcgtatgtttgagtttgataatcgtaaatagtttttttctgcaatttatcactgtcgatattaaaatattccataattacattttcaaactctgttttaggaatatgataaactgcacctatgcctaagttatcatctgctacatatggaaatttttcattatgcaactttggatacaacaaatcaaacatgtcatagaaattcagttctccaaaatcatcctcattccaatccactaaaaacatattatttaactcatatcctattggcaaaagatatttttcatttaattcccgacactttgcatccaatggcagtatacgaaatgctacatgctcttctgcagaacttaatgttaatacatacaattcttctgaaaaataagttccagaaaacatcagatatccatcatcggtatatctccaataatcggtttgatattcaccttcatcctcacttttcataatcccatctttgtatccgtaatagcatcttttcacatgaaccactcctttttctgtctgtaaatagtagaccgaaaatcctcccagactgctcacttggagtattgtcacttctgctttttcttgtttttccaccgaatcacaaaaatctatcacattttgtatttgtgtcatatcaactcgattttcacaatcaactgccgcatatccacattccccaaatctttctacaactttacgtactgtttccatatccttcagcttattttttgttgtggcttccgcataaatatctatcggaatatttataaaattgtcatccattcctttctcactgaccatttcaataggttcagaagatactggttcttctgtattccctttacatcccgaaatccccatcgaaaaacctatactaattaccagaaaaccacttttcaagaacctgactatcttttttgacaacataaccgcttccacctcttccttttacgtcttctaccatgctgacgatcataataggacgctccatattcttgtccgttgtaaaaacagaaaaccatcccaattcagtccccgttgtatcatcttttgatgctttgatttctgcagttcccgtttttccggctaatataatatccgttctatgtgctgcatagccagttccatgagaattgtttatgacttctttcgtatcctccaaaacagtttgcgccacatcctttgtaaatgcttctttaatccagacatcaggcattgcatcttccttatatgtaagatatggttttatcatatttccttcattgcaaaatgcagaatacatacaagccatatgcaaaggattcacaagaatctgaccttgtccatagccactatcagccaactgtacctctttttcaattttttctgtattggaaaactgcgattttgccatcttaatatcaaatggaagtacatcattgaatcccagttttgttaatgaactttccatatcgttttccccaatttttaatgccgcctttgcaaaataaatattatccgaataaattaaagcattttttagaataaccggctcataagcatgaagcgtcgttacataataagatccccatgaggaatctttctgccagctcaatccttcattcccataatcctcatctggatcaattgcccctgttgttaatccaatagcagctatgataggcttaaacgtagagcccggacaccagacctgtcgaaaacggttatacataggtttgttctcatcttcattcagcgcattccacttttcacttgacatgcccctaataaaatcgttgttatcatatgaaggtgtactgactaaagccaatacttctcccgtatactgattgatagcaactgaacagctcttatcatctttaaattgttcatataattctttttgcaaattcgaatctatcgttagttttatatcttttccattttctacaatcgtgcttactatgatttttttcttattgccatttgaatcaacaatagtaatagaacacccattctgtccctttaattctttttcaaataatccttccattccactttttccaataacactgttcgatgtatatccttcccctgcgtgttcttctaaatcttctgctgtaacgttttgaacatatcccactaaatgtgcagcagcctcccccagtgggtattcccttacagtgatatctaaaattttcacacctggaatctctaataatttctcctgtctgtctttctctgccaatgtttcctgatctggctcaatcgacatcagttttaattcattcacctttggaactgtttttaatggtacaaatgaatcatcttttacccattttgctgctaattttttttctatatcttctgttttcatttccaataattctgccaactgactgatagcatcattcttattctctaattttccgggaactacgcctatagaagaagccactccctcgcctgcaagcatgtgaccatttcggtctataatctgccctcttttagcacttgttgtagacacttttaccttatctgtggaatccagctctggaaatatcaaagaatcattccatatcagcttatatttgcctttttccagtataaatgatgccttattttcaaaagttacatttcctgcaacagtatccatagatgtttcataacagatctctttttgttctttatcataagatgtgatatgaactttcatattatctacaccaattccctcataaatagcagaattacgttttacaaaatcttcctgactgatattcccagatattcctgcatcgatcatttcatacatttgttcatattctcgatttgaaatatgagccatatatgttttaagaaccttctccggtgatatatcaggtacactttcataccatacaaaaatggcaaccaccgttgtaatcaagcataaattcatgagccatataatatatatcctgctttttttcttcatcatagtgtctcctctttcttacatttgtaagatttcattttaaaaaaaattgttctttccatttaaaaagtaatgtcaaagcaatcatgatttcttttttcggtatataatatcctcctcatatcttacattagtaagatataaacgtcaagtatttattttacttttattttaaataacaaaacatctggcacatcctaaggaagtgccaaaaacaaccttagcaagcacgcctgtgtcatgacacaggcgaaattcccccacactttcctatcgtatatgcgtgtgaatttccatagggaagtatccctaaccctcttttattttttcttcggttttcctgtggaataccttgacctttcctgccacttttgctacaaattgctgtgggtgattgtgcccaaaactgaacaaaaattgaaacgaattgttgtaaaaatcgaacattttacagcagtttttttgtacccaaaagagagaaaggaagcggcagaaatggtaaatcgaaaccgcaccaatccagtgcaattttatctcagcgatgatgagcagtacatcctcaacaccaaattcaaagcatccggcatgaagagtatgtctgcgttcctgcgcaagctgatcttatatggatatgtgtatgatgttgattacagttgtaagccatgtaaaattgactcattccagcaacattgcttcttgaaaaacctctgccatattcttctgtcagatatgatgacaaagaatccaagacttttgctccatattttgctctttctgaaccttgctgttcctgctcgataatatatcttccaagcagaaaactggtaagaactgtaattgcatttgccatttgtcccatattacttctggcactgtcaatcagcttttttgatttatcaaataaattttgaaattcgttactttctattatttctaatttttcatttttcacactagaacctccaaactgtctataattgtcaggtattttctaaaatagaaacattcatttttcatctgatctcatgactcataccgaaattatacctttcttgacttcatcatatatgaaagcaaagtacatttcaaaggtacgaaacgggtaaaaaataagcgtaccactatttctaatgatacgcttatcacattttcttttataagaactcttacagtggtatctctccactgatttttccttacatattgtccgttagcctttcgataagctgctgcctgctcgaaactaagcggtaactcaaatgaaagagaactcctacctatttgcaatagctgcctgtgattctattaataactgctacaaggtctgctttcaatcattttttaattgcttcaaatcaacctctatttacaattctcattataccaatcattcatactaatattaataatatctccttcatatctagttacccatccatcggaatagcttgaaaataaaccttgattatgttcatttaaattattataaacaacatctgaaattacaattacttttctataatctctacctgctttattacataaatggcacgctgaatttacaacatctcccatccaaataacatcattaattccactacccgaatatccagctttaaccatcaacgctctaccataatcaatacctatcccaactgaaatttccgaataatttttcttccttaatttataatcgagtattttaatcatactatttagtttggctgctaccgaaataacattgtcaatatcagatttataaggggtatcaaaaactccccatacgcaatctccattaatatttatctctttacaatcaatttctgcattcataatagcaacacactctgataaaaatgctctatacattttcgccaatgttggtcttttatgctcatctgtcatattagatgaccctacaatatcaataaaaattgccgtaacattaacataatatccatttttaaatgtcaaatcgcttctaacaggaatactgtctttatcacagtaatcattatcacttgcatttaaaatttcatccattctttccgaacttttatctacgtcataagacattgtatgatttgattccataattttcctccttctatattaactgaaatatcatacacacaaaccacagaataactgttgctaataaaaattttattcccttgttataccattttgcttttagactacatattttcgaatttgtatgtatctgttcttctaaatcatctatcatttctttttcgtccatatcttttacggcactcttataattctccaatgtcatatttccaatagagccaaagaaaaaaatagatggtgcattattaagatttttcactcttgcaataatagataacataaaacataaaatagaaataaagcttgataaatatagcagtgcaaccagaatggctgcaataatttctcctccagataattctgccagttttgatacctctgttattctttcaaatgcactgggcatgcccttttcaaatataacacctattaaaactcctgctaatgctaatgcaaatgaaaccttggtatccatatttcctatccatgtatttatgatacccagtgtttcataagcatctccttttttaaacgctctattttcttgcgttagattattattgttttccatggttagtacccccttattttctttattgtttgtaaatacccttcaaagttttttcttctttcattctttactctataattaaccagtgctctttctatttcattataaagcttatacaagatatgttccttattcgcccaatttaatgttgcagtttctaagtctacccaataatctgataattccgccataacaagcatcacatcaaacgatttggaatattcttgaaagtaatcataaattcctattaaataacaacctaattctaatgacacttcttttgatgttttccctagtaatcttcctaattcatattccttttctatcattaaaatcaaatccttttttcccaccttatccatgtactgatattcacggtagtgtactttagaaagaatgctcttaatatctacataataatcttttagtatttcttgcaattcttttttagcagtatctctttcatcaaaagcccttaattttgctacattttcattattatatttatcttcgtaatcctgattttctctttttattttatcctctaagacagcaagttgcttttctctttgtataagtttatcttgcaatctctcgatttctctaatgccatctgccaatccttcaaatgtatccgattctactgttgtatcttcttctattttgattggttttcctaaatcctctgaaaactccaaataataatcctttgccacatagccttggaataattttcttcctttatattttgctgattttacaaaaacttccctgtactcatctgacatttgcttgaaaacattatttgaaataaatatttctccgccagatgctatatctgaatatttgcttgcataatttgttgtattgccaacccatacacaatccacttcgttctctctattttcatcactttctaggccatacataccaacttgagtgacaagaacctttccataatcaataccaataccacattcaataactttcccattaacattagttttcaaatatttatttaagctataatcaatcacagtctgtaaacttcttgccgcattgattgctttatctgctgcactatccactatactcccgtttttatcaatggaatcaataaagacgcccataattctgtcacccagaaattgtcttgtaactcctccattttttctaacacaatcaactgccattctcataaatgaacgatatattttaaccatactttttgcttgactattttccgttaagtgtgttgacttacgaatatcgataaatagtatggctgccataatggaataggttttattattatcttctaattgctctattgttggaggcaattctgaatctacttctatttgttcaacagtctgttctgttatatttttaatccgcaaatctactttgtcaaaatcatttttagaaaatcccatacttattttactattctcctctatataatcaagatagcttttttacacattttcactttgtccacgtatattatacaaccttttctgcttattcgatagttctaaaaatccagatagccaaatagccgcctactcaaaaactgaacaaacggctataatggtatccgattttatatttagattagttcaaaatgcttcaacgcgtcctttatagcttccactttctctggtgtcggatgtttcctcggctgctttaattcttccaccgcattaggggcatcatacatcggcaagcctaaatcccgctttacttctgcgatgtatgcggtatgtactttgaagccgtattttgcttctatgtactccttagtcctcttataggtcactcgctctttcggcttgtacgcttcggctctcttggcaatattatcaagcggcactttgccctcaccctcgccaaactcgacttttacgttgattacgctatcaggttttttgttggaaagcattactaccgtttcattttgtgtatcattgtccaaacttagtgtaaactctttttctataatcggcaacttaaattctatagatttcagccactgaccattctctttgcgttcttcgtaaatctgcacattatccactaactgcgacaggaactcccgtttctctgcttcgttcatttgagcatacaatttatcaaagaacacgagtgccttgtaaatgttatcccctgtaatcttatctgccagcagagagcgtttcttagcctttgcagataccagcagttcctctgcatcatctattttatcataagtcttgtacaaatggttctctaaatctgtttttcttcgctgataatgcttatcctcataatcaagagaatccatatctgataaaatagtatctttattatgatatagctttcttaattgtattttataattttctatttcctgatctaatgcactagtatctacttccatatttattttgttgcggattaaatccgaaaatttaggattactaaccagtttactaatcacctctgcaacagaagcatccagcatttcttcatgcacctgttttttgtaatcacacttatgacctctagtcatatttctgtgtttgcagccataataataaaaatccttatagttacttccatccttgcgtttcttaatagacttgttgccatacattcctgcaccgcagacaggacatttcaaaattcctgataatagatgaatcttttctctgttctggtgttagctctggtggaatcaaattttccttcaccgcatctgtgtgaatacggtagttcacctttgataaagccctgttcaagttccaatccaatgaaaatcgactattttcatcttgttttaacctgcggtaatctttcataatatacagttgaaattccggagaaatccatgtagcaaatgccattgcaatatcgctatgtgcataagttcctccaccatatctgcctgcttttgacactattccaatagcattggtctgttcaatccatttggttggcgtcataacaaacctgtttaatcctgcctcacttctaaccgcctcgaattgcacacggttaaaatctggattatgaagttcttcccaaacagccaaaaactcaactgtatttctgtttcgcatccagttctgaatgacaaatctgggatcattatcatttctatattttgcaatatctgtcaacgaaatatattcattttcaaaatctttcgtgtaaatcccaatatcaattccttttgcgtgaataatttccctaactattttatttgccatctctattcctccaccatgttctccatctgttccaacttctgcaaggctttcatatacgccattacaaattgataattgactttttgaaaattattgttctcaagtttctatcaaaattagaaagagcccaaaccacaaggggttgagcttcatttgcacattcacggtattcttgcaataatagtaatatctggtcttgttatcttttctccctgctttggcaatatttccatacattccttttccacagcaaggacattttaatattccggacaaaatatgtgcatgttccggatcatgaattttttcacgcctgtaattattttttgaacgcttttcctgtgcaagctcccagtcttcctcggcaataattgcttcatgaactccctcataaacagggaaattcattcagcatacgcataaattcctgacgaccttttatattcttaccggaatgcccttcatcggaatattctcccacaatctccatatcctgaaattctgcatatttcctaagcttgtccttctgtgcatccaagctgtaaccatccacctgaattgctgttgatacacgagtatatatgtagcattttgttttctttttcaatacattcactcccctctactgtggtaaaatcaaagttggatttttcaacagcgttgcaatcaccggagtatatttagatactccatagtcttcaacaatactggttattctagcccctgcatcctttgacgaagcaccacataagaaaaccctttcatcagcagttccataatccaacactataaatcgatcatgaaatataccgcctgtctttttcattgatatttttacggatggatattctttgcaaaaatccgtaaattctatattatgaagtttattattcccaacattatcgctgaacaaagtaatatttactccagtcggagaattcttaaggtgtaccagcgttcttaatccaatataattatcaacaacatatattgatgactttgcctgcttatagatggactcatatacctcatctgcactactaaattttgcattaaacatgagccacttttcatcatcatctgaaacaaagctgttcatcatatcagccaactcagattttgttacaacatccttcattccttctgcaacatctgaaatctgcttttccagtgatatcatatctgagttgattttgttaatttctattctgttgttagctgtctccatgcttaactgaagtatttccctctgaccaataagatctcgattttctaaaatgtaatctttcattcttttgaaggttctcaccaatgcaatgctttgtcttaccgcaagttccccttttagtacagtcattaacatgtatacaccttgttccgtaaaaacgtaaggattgctgcgggatttgctgcttatatttgcggtcacaaattgtgaccgcaaatattcaacttcattatcagataattgaaacatcatatcattctgaaatctttctatatttctttttacctgctgattaaaagccttaagttcatatccatatacttcagctagatctgcatctaataatactttacatccccgaaattcatataatttttgtttcataaattcttcattgatctcaattactgcaatttcatctttctttttatcttctgccatggaactcctccatccatttgcggtcaaaaaaatcgtccgcaattctcatatgaacatattgctgacatcagcaatatgtccgatttgttattattgttctattatttctgttaatcattttcttttccatattaaactttctcctcccacattgaaccattttactgacgccagtaaaatggtctattcctctttttccctcagtttgtcataatacgctttatacctataaatcgtcctctcactgacattgttccgcttcgcaatttctaccattgtcataccactctcatatccaacaacaaaatcattataaattgccatccacttggcgttatgtttctgacgaccgcttaacttacgatttctgtaatactccaattcctcccgaagttctgcattctctttttccagctcctcaattctttttaatgcctcttcaagtgttaccgttttctccattaccctgtcctccgttcatgtcattttcgttttgtctatattataaatatctatgccgctttagtcaatccgattatgtcatgttgcatcatttttttacaatagctttcatacaatcgaaataccactgttctgacattgagaagtcttttcttgattcccacaaactctgtcatcctgtaaagtgccgccccgccctttgcctttgtttcatcaacaatgttcttggcagtagattttacctgtacctttatctcagatacctgtgactttatctgctcacatcttgcattgagtcgctcctgtacttctgttaatgctttttttgcattattgataaaggtatcttgtgtattgttgcctcaagtgtggcaaactgtgcctttgcctcctcaaagttctttctctcaatcgtgatcgtcaggtatctttcctgttcaatcccctgtctgccctcaataatcttctcctcaataatgtcattgtctctaacctcgctttcttatctgtgaaagcccgccgggaacatcacccaacgggcttgttcccgacctcacggtcagatacatatgaatagttgtgtttatcctgctaacactaatggtatatccattgacttcataacaaaatttgtgtataattttgttatcaaacaaggaggtgtttttatgccagcaatcaaatcaagtgctgatttaaggaataattacaatgaaatttctacattttgtcataattatcctgaaccagttttcattacgaagaatggaaaaggcgatcttgctgttatgagcattgaagcctacgaagaactgaccagccgctttgaactttacagccagattaaagaaggaatggacgatattgccacaggcaatacaagaccattttccgaagctatggctgatatcaggagccgccgcagtcgatgagctatcaggttcatatcacttccaccgcagaacacgatattatgcgtgctgcggattacatcgaatttaccctcaaaaatcctgatgccgcagataatctgttagatgctgcgactgaacagatagactcactagccgacctgccacagaagatccgtctggtagatgatccggtactggcaagctggggcattcgttttgtgataatcaataattaccttgctttttatacgattgatgaagaaaagcagtctataatcatagtccgatttctctatcagaaaagtaactggacttccattcttcgacagggattttccctcatttaaggaacctgtttttatgcagattcctttttagtgcatacaggcaacggcgaaatcctctcccccgcagttaaggaaagaaatgcggtaatccgcaggggggcggcttggctggtttccgtcaatatagcgattacagcggcgtgtcctgcccacctttgttcccctctacggacagaaacggaaaatgccaaacgctcatttggatttttcatcactactacggcaggcaagcccatttcgggcaaacttccccatcactcactactacaagggaacgaggcgttttgccaaaaatggtagcaaaaaacgccacggattttcaaaaatctgtggcattgctgtttggagcagtattcaattttagtctcccgttccctctttttggtaaaagaaaaggacaaccgattttggctgtcctgtgaaaatgtgtattatgttgtattatgtaagattgacaagattaaatttgaagatcattcttctacaaagtatctgtatgcagcggcttcaagctctccacattcgttaagcaagttgccattttcatcataaagcttataggtaatttgagtattacctaacgacgcttctccgtccaatccaagcaacaaagtatagtaattttcttttagtaccaaattcaatagatcatacaaatcatcttttgatataccttgttcagttattgcactgatttttttgccgacaactgatgaagaattaggattgaagtattcggctaaaatggttttcttttcttcatagcataatttaacaaattgttctcctgtcatttttatactccccataccgtagtgtaaaatatatatttatatttcattctgtcggaactattatagcacatagatgtgaaattttctaccgtatttcccccataatgggcgagccataatgggcgggagcgacagcactttagtctgtcgctcccttgattgccacaaaagcaggacgggcggcggctgtcatatggcggtgcagtatgcgccgttcattttacccttgacggctgccgcctgttctgctatcttccctcggctgtacggaatagcggcgtgactgactgtccttgtccttttttgttgttgcttctttattaaccatgatcattagctcctggattgtcgttaccataaccttccagtaagttaatcgctccccaaattccaagacctgctccaagagcaattactaaagtctgcaatactgttactgctgagttaaaaaatgccataaagatttcctccttgatttgcccgcctacgtggtcgtgctaattaaataaaaaaggcctttctactctcagcatgtgcacctgtggggagagaaaggcataaaaatatcccagtctctgatggataccagtaactgggatatgtaaatatattaactgagcaatttctgtattcgttcataatagtgtgcaaacaaatccttgtccaatcttaactctaataatatttctttcaatttaggatgtaattctatgctttctgcatctatactgttctcaataaggaaaaatgctgttaatcgattcattcttatttcacttccagccagctcttgtgttaagctgatatacaactcattatagttttgattatgcatattagaaaagaggttaccggcagcaaatgttaagttacgctttcccaagaatttctgacagatctttcagagtatctttctctttttctcccaaaaacaggattgtgtcgcagtttccttcaatggtcgatgcgttgcccttatacagagcctttagctgtgacttttgactgcaaaataatagaagctgatatttcccggctacgaatggtagcaatcagcttctcaaactgtggaatctgcccgatgtttgcaaattcgcccagtaagcaccggacgttaatcggcagtctcgatgcatttatgaccttaaaaataagctcgtcaacgcaatccgtatatctgccttgctgaataagctgattttttaactctacaaggctatgtatcaaaagttttctttcgtggctatccaaatacagatgattaaatttatctctcataagcacacctccacttatttaacttcattatatttgaaagcaggggaaaggacaaatctgcaaaaagggacaaaaaaataagcgtaccactatttctaatgatacgcttatcgtatttaactgttaatcaatgtctatgaatacccttacagtggtatctctccattgattttttcttacatactgtccgttagcctttcgataggctgctgcctgctcgaaactaagcggcaattcataggaaagagaactcctacctatttgcgatgaatgcctgtatttctattgatatatgaagtccttagcaatgaactttatatataaactttttcaatataatcatcgcttattaatctgagaaagaatttccctgcactctccaaaagtatgaatagtataatctggaatatatccattttctttccactcatttttatattgttgctctcgctggaaatcttcttctttccaatgtgatatagctaccaatttactatataggtcccgaatatcgtctctcggaaaatcacaccatattgatgtaataccagcttgttttgccatcatcatgtctttagataaactatctccaatatacactgcttcacatacagaaactttctccccacaacaaatttcttttaatacctctgcattaggtttcttgccatgtactatatgtgttttgggagatgatggaatagtatcggggcgcttatacaaactatcagatacgtatacctccttaaaataattatcaatccctaatttctttaatcgataaaaaccattttcttctgctgactcagtatatgcaacaaccattatattattgtcataaaaaaattttaaagtctcttctactcccggatacaattttaataactttttacgagtagaattaaatttatgaaaagcagggttaagttcaattttgacttgttcatcagaaattccacaatatttctttttaacagatgggaggttcaaagttgcaaatggatactcaacacttcctacttcttgatgaattgctttatattcctccaacagtttctcttgaggcacgttaattaatagagatagctcctgtaccatatcataaaaagctggtataaaaaagccaatccatgagtataatgtatcgtccaaatctgtaattactagctttatcatctattatcctccatctaattttatattggtatacgcaatgtttgaacacatttatctgtttcagtgttatcagcatatattctaaaaaatttcaactcaatatgatcattgcaaaacgtcaatgtagaaaacttattttcacaattaaaagctcctgtccctcccattccaataacgtatatatttttcattctatcttcatcaatttcataaatgctgttatcaaaatgccctattttagaaacaaaggattgatgcttatgcccatgtaaaagtaacttaatgtcatattttgctaaccactgtacaagacgctcagcatcatatacaacgctacttggcttttttacatctacctgctcaaccaaacaagttggcatataatgatggtgcattatcacaatacgaacagaatttgtttgaacattttcttcccatcccattttatttgcaacatactctaactgtttatctgacaaaaatccatgtccctcaaaatccttatattgctgtaaaataagactatttaaagctactatttctacagttcgtcctgtagacattaataatctacgcccacatgccatatattcattaggattcaaattatgaatcgaactatagaactccttatatgcactgatactatctgggttttctgaaaccatctcaggaactccattgccaagcatctcatttttacgcacaaaatcatgattaccagggcaaaaaattatattttcagatataagttttcttgtaagattcctattcaaatcaacaataaattcttctgccttggtgaaaccctctggctttccaagtgatgtgatatctcctgttattatcaagcctcccactttgttaaggtcattatatgcgtttctaatatgtgcagttaaagttacatctgtttcctttgccattttaaccttaaaaacatcatctgttccaaaatgcaaatctgataaccataacaaagtgtcactgccagtttcaaaatatttgtcactaaagtcatgtggctctacaacactagaatttaataattgtatttcataatcagaatcatcattctcattatagttccgcacaaaccatattgtcctgttttgctgaatcatttccttaatattataaactctttttccataaaatttttcataattagaatgattttctacgaatagtgaatctacattcacatatgtataattcttaacttcatcagcctcacattcttcaattttatcaaatttaaaccatgcataatacttttgttcattataataattgggggtacattccaattctggcgataatatcttatcgcttccagaacattttatatcaaggcattcagccttatacaacttttcctgtcccgaatccataagataaaaatattttggtttgccctcaatttcaccttttagcacacagaattcttcaaatgggagcttctcattccccttattccaccacccccaccagacatatccctttttatcaatcatatctttatgtctatctatagtaacattattttcagttaccaaatctctaaatcgtaaaattactgttttaaattccattcaaactcaccttcatactatcttaagtattaacactcataaattcctttatataacaaacaatttcattatataacctcaaaatgcttcaacgcatcctttatcgcttccactttctccgccgtcggatgcttcctcggttgtttcaattcttccaccgcattaggagcatcgtacatcgataatcctaaatctctctttacctctgcaatatatgcggtatgtactttgaagccatatttagcttctacgtactcctttatcattttgtaggtcactcgctctttgggcttgtagttttctgctcttttagcaatattatcaagcggaactttgccctcaccctcgccaaactcaacttttacgttaatatgtccatctggttttttgtgggaaagcagtataacagtctccacatgcgtgtcattttaagacatatccccacaaatcaacagaaaaatataattatctttataatatgaatagcagtaatcaataacctactacatttatccttaatgtttaatcaaaaaatctgacttattctcttcataactcttaagaatacttataaaatgattgcttttaattgcatcgtagttattcattttctttaattctaaataatttttcttcgcaatttccatgctggtatggcttatgtaacatgctgcatattcactaatagatggaacagcccaaagatatttctctgattttactactttgttatcttcatcatatataatcgataatgttaagtaataaatcgtaaccatacgcgtttctgctatagaacttgcaagcttcacctgaaatctatcgacttcatttgcacctatactttgtgaaacattaaatacttgttgtttctctttccctaaaaccacatcataagtatgagaggattctaccaattgataatgggtcatttgcggattgatcatattatagtaatctaatatatcgaatgatatctcttttatattggctacttggtctccaatgtttctcaattttatatcaacaataaattctttatcttcatttaaagagatatctactatttttatatttgattgttgtttttcttctgtaagatttgtaatttgaagaatgtttccatccccgataacatttttatctccactaacattaagatttccctcaccacctttaggagtttttgtttttaatattgcaaagaaagctgatataatagctatacctaagccactaaatatccattctttattacttataatccattctactatgtaaatattctcctttgtttttttatttaccaacttttctctacaaccgtcctatttatctgatattttaaaatacaacatccattccgtttgtgtaatagactactgcataaacaacatttaatacagcataggaggtttccctttgttatccacaacttttctgacataaccttcccacttttgaattatttgtatccattctttagatttaaaataatcatctaaattgcaattcaaatcaaattctggcatatacaccccaagaacacccttttctaatattccttctgcaataacccctttctctctcagtattaaaacaggcaatcccaattggaaagccatagccggttcaatttgacaatatggactagttaaccatttattggataaatcatactcctcctcgccaatatcactaatcggtttccctgttccttgtttaattaaacttcttctaaacgctattgttactaatccatttgattctaacatcaaccttcttattgctgttaatggcgcatccatatcataatctgtcacccctaacgttcttggttgtaactctctttcttcaaaataatgaattattctttcaataaattcttcttgcctttttttaaatggtcttggataactcaaaaatatagaactactcattaaatctcctccataatttcaaaatatcttaatgcatcctttatcgcttccactttctccaccgtcggatgcttcctcggctgtttcaattcttctaccgcattaggagcatcatacattggcaagcctaaatctctctttacctctgcgatatatgcggtatgtaccttgaagccgtattttgcttctatgtactcctttatcattttgtaggtcactcgttccttgggcttgtattcttcggctcttttagcgatattatcaagcggaacttttccctcaccctcaccaaactcaacttttacattgatatgtccgtctggctttttgtgggaaagcagtactaccgtctcaacatgataagtattcggaaacatatccacgcagcatatcttctccactctataccctctggccataaatatctgcaaatcccttgccaggcttgtaggtttacatgaaatataaaccatattctcaacatcataatcaataatccgcccaatagccttcggatggataccgtctcgtggtggatcaagaattatataatccggtttttcctctatttcatcaagcaccttgaggacatcacctgcgataaatttacagttatcaagaccattaagagctgcattttcctttgctgcgcaaactgcctcctcaactatttcgacacctactacttccttacacaccgatgccataagctgcgcgatggtgccggttccgctgtagaggtcgtagactgttttaccgtttagcgaatccctgtcacctcccaggatgaactctctcgctgtctcatagagcacctccgctcctagtgagttggtctggaaaaatgagaatggtgtgattttgaatttcagacctaagagctcctcgtagaaatatgaatctccgtagagcacctctgtgccctcgtttttgaccacatctgccacgctgtcattttttgtgtgtaaaacgccattgaatctgccgtcatagtgcctggtcaaaagtgcatatctaaagcctgcgagcagttcctcctcgttgaagccctctgtctgtgtggtggtgacaaggtcgactatgatttcaccggtttttgttgcctttctgacaagcagatgccgcagatagcccttgtgtgttgctctgtggaaatatgggatattgttttttgaaaaataatcaagtgttgcctttaatattgtcctgaaatcctcatccacaatctgacagtctgatactgtcacaaggtcataaaagcttcctcttttgtgcatgccaagcgcaagagggccatccttgtactcatcaccgaaggaaaattccatcttgtttctgtattcactctttttcggacttccatgtatccctataaactcatatcctgactctttttcagtgccgatagcatccgaaatgagctttttcacctgggtaagcttcatatcaagctgcttttcgtaaggcactgtctgatatgtacagcccccgcacattccaaagtgaggacatggctcttctgtctccagaggcgatttctcaattacctccatgagtctgccctctgctctttgatgctttactttatttacaacaaattccaccttctgtcccggaattgtatttttcacaattactctgtcgccatcatctgtaacggctattcccttgtttgggaagtctactctttctacggttcctgttcctctaaatccttttttcatgtaattcttatctctctttatactttattattcctttgtatgcctgactgcaaatgccttgcttcacacataaagaaaaatgaggactacatatgtagcccccattatctaaaaacgattatttctcttctttagtctttggtgcctctttttcctcttcagcatcatcatcgtcttcatcctcgaagaaatcatcatcgaattcatcatcatactcatcatcgaaatcatctaaataatccggtgtgaaaaacctgtagataccatatgccgctgctgcaacagcaactaatacaccaatgatggcaaatatgataacagccttggaaggcttcttgtcttcctcttcttttttgagaaggtcattaagctttgccatgctgagcttctctgcaagcttgttgtcctttaataattcttcaactttactcataattcaatccgctccttttccaaaagtaattgtcaaatgctatttgttaaatccattatagcatattatatccaattttcctataaaaattacaataattttagtcaatttttttcaatttggcaaatgaagcaaacatctttttggtaccggccttgtcaaagtccacagtgacctcataatccctgccgccttctacaattgccatgacctctcccgcgccaaacttgatgtgtgatactctgtctcctaccttatatgaaaggccgccggtggtattggcactggcaaatgacttctgattgctcacaggcgtgtagacaggtgtccttgtacgctgtgtattaaaggtggtcgcatactctgtgccgtatgtaggtgtctttttgaaggcctccttagcctttctgtaggtgctctgtgaatttctttcaatgtcatcatcacggcgctttggctcatagacctcacctgacataagctcacgcggaatctccttcacaaatcgcgataccttgttgaactgtgtctctccacgcaccatacgcatgcgtgcagatgtgatggtcagatgctccttggctctcgtgatgccaacataagcaagacgcctttcctcctctatctcgcttgtcgcatcatcactcgtgattgacatatagcttgggaaaagaccatcctccatgcccgccagatacacattcggaaactcaagtcccttagcactgtgcagagtcataagaaccacatagtcgctgttttcgtcaagaccgtctatatcggctacaagcgctacctcctccaaaaagccactgagagtaggattctcctccccctgctcgtaatcaacagccttgtttataagctcatcaatattctcaatacgctgctctgcttcatccgtgccctctgccttcagctcatcgacatagccggtctcatcgattattgcctgtatgagctgcgaaaccgaatccatctcggctctcgcacgaagtgactgtataaacatcacaaaaggctttatcttgcctgctgacctcgccatgcccggcacctcatcgacatagcgcagtgccgtatagaaatctattcccttctcaatggcatagtctgtcaccttattgatgcttgtagctccgatgccgcgctttggcacatttattattcgctttaccgcaaggtcatcatggccattgtcaatagtctttaaatatgcaaggatatcctttatctcttttctggcatagaaattcacgccgccgacaatcttgtatggtatgttggctgcaataaatttctcctcgaagagacgcgactgtgcgttggttcggtaaagcacagcacagtccttatagcgcgcctcaccctttctcacgagtctcgctatcgaacgcgccacataatccgcttcctcgaagccactctcaagctgttcaaaggtaatcctgtctccggctccgttgtcagtccaaaggcgcttgtcctttctacccacgttgttggaaatgacgctgttggcggcatctaggatattctgggtagacctgtaattctgctcaagctttatgacctttgcatcttcaaaatgcttctcaaagtttaagatattgtagatattggcacctctgaacttgtaaatggactgatcatcatcaccaaccacacacagattcttatacttcatggcaagaagcctgataagctcaaactgcacggtgtttgtgtcctgatactcatccaccatgatatatctgaagcgctcctgatagtaatccagcacctctttatccagcttaaaaagctctactgtcttcacaagcaaatcatcaaaatcgagtgcgttattctgctttagggcattctgatactccttgtatacaagtgcctgcttgcgcttcacgaagtcacctgtgaagcggttttcaaactctatcggatcaatcatctcatcctttgcagatgaaatgacatttaaaaacatcttttccttatacatcttggtatctatctcaagacgcttgcagatgtccttcatcagagccttctggtcgtcagcatcatatatggtaaaattcgtgtcatatcccagcctgtcaatatacctgcgcagtatacgcacacatgtcgaatggaatgtagaaacccatatgctttccgaaccatagcccaccatatcatcaattctctcacgcatctctcccgcagccttgtttgtaaaggtgattgccatgatattgtaaggattgacgccacactcatctatcaggtaggcagtcctgtatgtaagaaccctggtcttgccactgcctgcccccgctaaaataagaagcggtccctctgtggtcaaaacggcctccctttgctgttcattcaacatatctaagttcatctgttttcctctcaattctccagtcttttacaggcacacataccataaatacaaaaataatttatttacagcatatcacaaacatatgttttgtacaacccaatatgagaaaattcaaaaaaaacttgtcatatagttttcaatactatataataaaagcctgaggtgatgatatggagaatgacgttaaagaatttttatcagaattattaaagcagcttaaatcaatagattacataaagccggaggatataccaaatattgatttgtacatggatcaggtcacaaccttcatggacgagcagctcgctgcatcaaagcgctatgaaagcgacaaaatccttaccaagacaatgataaacaactatgccaaaaacaatctgctcccttctccggacaagaaaaagtattctaaggagcatgtgctcacactgctttttatatattatttcaaaaatatattgagcatcaacgatatccgctcaattcttaatccgcttaccgagaagtatttcggcaatgatgacggatttacgatgcaggatgtctatactgaggttttcagcttagaggcggaggaatcgcaaaagctcctaaaggatctcggcaagaaatacaagattgccggtgaaacatttgagaattttcctgatgaggatcagaaatttcttcacacattcagctttatctgcatgctgagctttgatgtctacatcaagaaaatgctgattgagcgcatgattgacaatctaaatgaagaaaaagaggcttcttcccatgaaaatacacattcaggaaaagaaagtaaaaaaacaggctcaaattaatgagcctgtttttcttttcccctatgataaactaatcctctttgtcagagccatcctccatgcgtgaaaaaaccatatcatatccatcgttgccgtagtttaatgatctgttcacacggctgattgtggctgtggaagccccggtcttttctgctatatcaagatatgtcttctgctctctaagcatctttgccacttcaaatctctgtgatagagaaaaaagctcatttacagtacaaacatcctcaaaaaatgtataacactctgctctatccttgagacacaaaatagcatcaaacaaatggtctactgcttctgtttttagattcttgctcatcgtgttctcctttttcatgcgatttatttacttttaattttaacatattaaagttttaaagtaaacagctttcttgcaattaaattatgatatgttatactaatgttactatcgcctaataaatcagaatggagtaaattgaaaatgaaaaaagtaggatatttcttttacacatttgtcccactgcttgcagttgaggcaattcagactatcgccttattctttatgatgggcatgggaatgtttggacagggttttgtcggaaaacttgcttttccgtctgcaaacgtatcggaccgccttgaaaagacatttacctctgtaaattttaacatgatgattatgatcatctatgcactcattaccattgcgatttttggcatgtggtactatgccagatacgaaggtaattttcttccatcccctaagaaaaccttcaatcccatgatgattgtggcaatcgtcatactcgtgccgggtacacagtttgctgccaatttcatcgctaacttaaccggctacatccgtcccgactggctgcagcagtacaacgagctttttgagacatcaggcatcacagataccacctttgtgacagtactttattctgtaatactggcgccaatctgtgaggagcttatattccgcggtgtaaccatgcgctgtgccagaaaggctttgccatttgctcttgccaatctgatgcaggctgcacttttcggactgttccatctcaactggattcagggcatatatgcctttgcacttggcatagtgctcggatatgtgtgcgaacgcggtggctctatttactactctatggggcttcatctgcttttcaacctttggggcacactttcaggatttttccctgatcccggtaatagtgtagtggtctttgtggttgtgattgtggttacaattgtttcactggtggccggatttgtactgtttaacaaaggacgaagaaagctccccataaattctacaggaatatagacacgcccgccagacttactatcatcataatcatgccggcaagcagtactccaagcatgacagcggcaactgttgacttgaaatccatatcaaggatacttgccgcaagtgttcctgtccatgcacctgttcccggaagtgggatacctacgaaaagtaaaagtgcaacaaacaaaccttttcctgcctttgcctgaagcttcttgccgcccttctctcctttttcaaggcagaagctgaagaaccttccaatgattggtttgtctgctccccagatgagcacctttcttgcaaaaagataaataattggtaccggaagcatatttgcaatgatacaaacgataaatgatggcactatcggcagccccatcacctgtgaaaccggaactgctcctctgagttcaataagtggtaccattgaaattaaaaagatgtaaatatatttttttaacatgaataattctccaaaaatttaattagtgtatgcatctgctcatcagttcctatggatatgcgcagatagtcgttgattcgctcaggtgagctaaaatgtctgacaaatatattgtctgccttaaggtcctcaaaaagctttgttgcagaaacatttgcaggctttgcaaatataaagttgctctttgagtcacagaatgtaaagccaagtctcttaagctctgtctttgtccactcacgtgtctttataacctttgctgtggtctcttcaaagtatgctctgtcttttaccgctgctgtagctgcttcgattgtgattctgtccatggtatatgaattgaacgaatatttcacatcattcagatacttgataagcacaggacttgccatggcaaaaccaactcttgagcctgccagcgcgcgtgattttgagaatgtctgtaccacaatgacattatcatatttgtcaatgagcggcagcgcactctccccgccaaaatccacatatgcctcatctactacgacaattacatcctgattgtgctctattatatcctctatctcatcaagaggcatgagctttcctgtcggagcattagggtttggaaatactactccgccgtttgccttatagtaatctgacggtactattgaaaaatcatcagacaatggaagctgctcataagggattcgaagcatatctgcccacacatcataaaatgaatatgtaatatcaggaaacagtatcggctttttcgaattgaaaaatgtcatgaaaatcatggcaagtacatcatcagagccaactccgacaaacaccttcgagctgtctatcttatagaaatccgcaattgcatttaccagcttatcaacccttggatcaggatacagtcttaaatcatctgtattgaaattacttaaaacctccttcactcccggcgctggcggatatggattctcatttgtatttaacttaataacacaggtattctttggctgttctcccggtgtataaggtacaacccttcgaatgttattttcccagtctctcattcttttcctccaaatttaattatatgtcaacccatacatatttactgatcattcaattttcttctcaaaaaaacatgatatcaaacataaaatcagcgtttttattcactttaaaatatgcaccaaaaaaaatgccaacaaattaactttacctcatttacttatgtttgtaaaggttgtatattacacttaatcactattttttatatatatttttatctatttttaatcaagggggattataaataatgactaaaaataattcaaaggatctcactgtaggttctcctaccgggctcattctgggcttttcccttccgttgcttctcggaatgcttttccagcaggtttacagccttatggatacaataatcgtcggtcgttttctaagtgtttcggccttagccgcagtcggctctaccggaagcatctgctttctcatcattggcttctgccagggtgtgtgtgccggcttttcacttccaatagcccagcgctttggtgccaaggatgaaaaaggacttaaaaaatatgtaggaaatgcagggattgtgtctgtaattatcgcaataatcatgacggcactcactgtgcttctctgcggtcagattctgacctggatgaatacgccaggcgacatttacgacctcgcctaccagtatctgattgtcatatttgcaggcattcctgccacaatactgtacaatctgctgtcaggatatctgagatctctcggcaactcggtcatacctgttattttccttataatcgcggctgttctaaatatcggtcttgatttacttttcattctggtatttaacatgggcgtgtttggagcggcttttgcaaccgtactgtcacagggtgtatcaggagtgctgtgcatcatttacatagcaaaaaatgtacctctgctgcatgtaagcagaaatgatttggagcttgactcttcatatgtcagaaatctgatggtcatgggacttcctatgggctttcagtattcgataaccgctataggcagcgtcatactgcagactgccgtaaacggcttaggctccatcgcagttgcctcaatgaccgctgcaagccgtatttcaatgtttatggtgtgtccatttgacgcactcggctccacaatggccacctacagtggacaaaatgtcggcgcagccaaatttgaacgtgtaaagaaggggcttatttcagcctcagttataggatcgatctattcggttttgatttttgtagcactgctgtttatagccaactatctgatttacctgtttgtatcaccaagcgaaacagaggttgtcgcacaggctcatcagtttctgctgataaatgcatttttctacatcccgctcgttctggtaaacacagtccgtttcaccatacagggcatgggtttttccggctttgcgatgtttgcaggagtagcagaaatgattgcgcgttcgctcatcggacttgtatttgtaccgatattcggcttttctgccgcctgctttgcaagcccactcgcatggatattcgcagatgccttcctggtgcctgcattcatccactgcctgcataaattacagaaagcaaaatctagtcaagttacaagtctttagtaaaaagtcattaacaataatggctttaacaggtcctttaaaaatcagtttatctcacagccgaggaaagcaccggcgaatcatactatatattgagctttacgaagcagcttagaagcagttagaattatgtccatatacaacaatgccccagcatggacgctggggcaaggcgttatgcgccatggacggctcataaaagccggttgtgtcatggtctaaacactccaaatcataattcttactgcttcttagctgcgtagtacttgcgaaatatatagtatggttcgccggtgctttccgtattataaaaagaaaatattataagtttaccgcatctataaatttttggaacgctgcacgtccctcatcagtgcacttgtacactccggcacactcaagcacttctttaaatacaagtccaatctcctcattgatgataccatcaatattagactcatcaatcttatcatacttagacataaacttaagagcccagtcagcatgtgatgcaagagtctcagtcgaatgcagatcctttcctgtaaggattgcatccctaagctctgccatctcaccttttaatctggccggaagcactgcaagtcccattacctcgataagtccgatattctccttctttatgtgatgaaggtgggcatgcggatgatatacgccaagcggatgctcctctgttgtgatgttgtttctgagcacaaggtcaagctcatagtctccgtcacgacgtcttgctataggtgtgatagtgttgtgtggctctccatctgtctctgcaaaaataaatgcttcttcatctgtatagcctctccatgcaagaagaatcttatctgcaaggtcaataagcttatccctgtctgccgacttgattctgataacagacataggccattttacgatacctgcttcaacatcctcgtagcccttgaatgtgatttttttctctatcggagcctttgccatagcgaaggtatagtgtccgccctggaaatggtcgtgacttaagatagagcctccaacgattggcagatctgcatttgagcctacaaaatagtgtggaaactgtgtcacaaaatcaagcagctttccaaatgtggcacgctcgattttcatcggtgtatgctttgaattgaacacgatacagtgctcattgtagtatacatatggtgagtactggaaaaaccactggctgttgtttattgtaacagggataattctgtggttttctcttgcaggatggtttacgcggcctgcatagccctcattttccttacaaagctggcactttggatatgcgctctgctttgcatttttagcggcagcaattgcctttggatccttctcaggctttgagagattgattgtcacatcaagtgtgccatactctgtgtctgtggtccatttcatatccttctttatgcgctgtcttctgatataattgctgtcacagcttaatttgtaaaaataatcggttgccgcaagtgaagactcattgtcgtataaatccttaaaacgagctctgatcacgcttggtgcatttacaaggcagcccatcagctttgtatcaaaaagatccttgtatacaatgctgttttctttcatgatgccattgtcatatgcgtatgtcatcatatcctcgagtataccctcaagcttctcctctgcctcttcctgtgtccatgcaggctgagcctctaccttttcaaatgtctcatcctcgatatcgtccactccgagtacctcgagaagtctgtttactgtgtatacctcatcagcagggtcaacaagtcctgttgtaagaccatattttactaattctaatattctctcctgaatcatgtcatgctccttaatcattgtcgggaaaaccctgtttatccgttactgttatttcatattgctgattttatgccagacggctaggtccgtctccgattgaaacaacataaaactcaggtgtctttccaaccttctcttcataggcctttgtcaggtttgccttaaactgatcaatagcctcgtcctttactatgctgactgtacagccgccaaatccgcctcctgtgattcgtgatccgataacacccggaatcttccatgcctcatcaacaagtacgtcaacctcaggacatgatgtctcataatcatcacgaagtgatacatgtgaagcattcataagctttccaaatgtctcaatatcattttccttcaatgccttaacagccttgatggtacgctggttctcataaaccgcatgcttgcctctcttacgtgcaacctcatccttaatcgcatccttatgagcctcgaactcttcatctgtcaggtcaccgagagtcttgatgtcacatactgtctgtaaatccttaagagcctgtgcactctcatttcttctgtcattgtaagcacttgttacaaggctgtgcttaaccatgctgtttgtcaccacgatctttgcaccgtccaaaacgattggtgcatactcaaaatcaagagtattgcaatcaaggaaaattgcattgtcctttttgcccattgcagatgcaaactgatccatgataccgcaattacagccgttgtagttgttctctgaatactgaccgataagtgcaatatcctgatttgtcacgtcaaagccgtaaatatcctttaacatatatcctgtaaccacctcaagagatgctgatgaagaaagtcctgagccgtttggaatatttccgaataaaacaatatcaagaccgctttcaagcttcattccgcgtccctcgaaggcccacataacgcccattggatagtttatccaaagtccgtccggatcaggtgtaaactcatcaagtgatgactcaaccacacccagattgtcaaaattcatagagtagaaacgaagcttcctgtcatcgcgctttcttgctgccatatatgtgccgatggtcagtgcacaagggaacacatgtcctccattgtagtcagtgtgctcaccgatcagatttacacgtcccggagcaaaatatactctgatatccccatctgctccaaaaagctccttgaatttgtctaatacgttctgctgtatcattttttcttctcctttgctgattgtatttgcgttaaattgatagttaaaataattcgttttttctttataaccctattataactgcacatttttacattgcaatacatccgactgaaaatgcaacataacaaatcaaatcatgcaacaaaattacatatgttattattttattttttaaaattcttaataacatcaagtgccggcagcacatttccatcatagtcaaaaagtgcctggtttgcccactcattgccgcatggtcccggatcattcatgtacttaagtgaagcaggtgtagcccagcctgagcccggtacaggaatccacgcaggctcccaccagaaaaatccttttccgtggtcatccaccacatttgccactctgtttaagaaatcctttgtaaagtcagcctgtccctcaatagtcataggataatctatcttctcgacaagctccggttttgtcgcataacccttgcgctcagaatcagcaagcttctcgtactcctggtagctgtccattgtaaagcccatggatacctcagcgatgataaggtccttattgaaacgctttgcaatatcgttcatattgaactcaagctgatcgagagagccgtgccagaaaggatagtatgacaatccgatatactcaaactcctctcctctttcgatgaagtttgtaaaccatctgacataaagctcattgtttccaccattatcgaggtgaatcataatcggaatatcagcatttaccttgcggcaggcacgtattccggcattcacaaattttgctatattatcgtagttaggtacctttccctcaggccacaaaagtccgtttgaaagctcattacctacctgaatcattgtgacatttacacctgcctcaataatctttgtcagattttcaagtgtaaaatcatatacagcctgctccagctcgtccacaccgaaatctttccatgcctttggcttaatctgctttcccgggtctgcccagaaatcactgtagtggaaattcaaaagcactccaaagcctgcatctgtaaccttttttccgatagcaatagtctcagccaggtcattgttacccgcaccgtaaggctcaccatcctctgattttgggtcgttccacagacgaagacggattgtgtcaacatcatgctccttcataatgtcaagaatatccttctcctttccatcctcgtagtattttgctccgcagcgttctaactcgagcaaggtcgataaatccatacccttaataaattttgacattttaattctccttaattcttatatcgtttatttacaccatgagagcagccacagtagcagtctctgctctcaaaatgtgtaataatattcctgacaaccttaaaatgctaaattccgcggaaacagaatgtgaattccattttctctgagacatcaagcaggtactccggatgagtatgtgagccccagctgtcgtctccgcctacacccatctgcttctttgccacacggacaacagtatagtgtacaggtggaagctcgaaatgatgcgctgcattttccagctcatgtggtgtatatggcagtgccgagaacgagagctcatcaccaaagaacagcatgcctctgcccttcttatccattacctttgcatatcttactctgcacttgttgccgctctcctgcggaacgaggtactcggcaatgttgtctgccactttattctcgtatacaccatactttccgccatgctgtctgtcctcgtatgtctcctgtggtccgagtccgtaccatttcactgtatcataatcggcatccagcttgaacatcatgccaaactccggcatatcgccaagttcctttacagggtcatatgacagagttgtctcgattgttccatcaccaaacactctgtatgtcacctcgcatgaactctgcggtgtggtaggcatgaaataagtgtatgtgatggcgatattgttgtcatttttgtctacccttggtgatgtatccgcaaagcgctgatcctgtctggtggtcacatacatgctggcaatcttccactgtgcatagcgctgtggcatcatatttccggaatcattgttggtaggtgttctccagaaattcggcagtggaatagtatttggaagcatctcgacgccaccatatacatatgaaaccattcccagattcattcttgagaaaagtgccttgaagttctcacctcttacaaggatatttccgtttccaacaacaagctcaactgatttgtcgcatgaatactcacttacaggcttctttatcatatgctgtccgaatgcaatctcatatccggccttttcccagatggtgttttccttcaatacaaatgatacgacaatacagtactcttttcccacatctatcatggaatttttaagagtcaccggcacctcatagcttgccctatccatcggtggaacagatatctgaagctttgtcctgtaaacctcctcaccgtctgcaagaagaatggcaaaagcatcaaaaaccgatgtatttacaaagagatttttgtttgtgactgtaaagatgtaatcgctgtcaaaatcaaccgagatattctgataattgaatttcacctcctgcatctttggagaagcctctctctctccgccgtaacagatgccgtttccgctgaaatctccatctgtaggcctgtcgccaaaatctccgccatatgtgaggaaccacttgccgtatctgtcctttttgtaaattgactggtcgatataatcccagataaatccaccctgatatctaggctctcggtcagaaagctctgtgtatttatgcatagcaccgcaggaatttcccattgcatgtgtatattcgcagcagataaacggtttctcaggatgctctgccaggaatttttcaatgcctgcagccggagtatacatctggctttccatgtcgcttgtgtcattatagcttctatcgctaaatactccctcataatgaaccagacgatgcttatcaagctgtctgaaaagctgtgacatctcatatatggtcttgccgccaaacgactcattgccgcatgaccagataaggattgccggatgatttttatccctctgatagcatgagttggcacggtccagcatcatttctctccactgtggcttgtcctttggcacaacaaagtcaaggtcaacatagcccttattatatgcctcccatgtgccatgactctcaagattgttctcagctatcatatagattccataaatatcgcaaagcttatagagcatggaatcatcaggataatggcttgttcttatagcattgatattgttctttttcattgtgacaatatcctttatcacctcatcacggtttggcacacggcctgttattgagctgaactcatggcggtttacacccttaaatacaatacgcttaccgtttagcttcatgagtccgtctaccatctcaaatcgtctgaagcctgccagctggctgataaactcggtctcatttccatgcgtatctttaactataattttaacctcatacagattcggcttttcagcgctccataacagaggatttttcacattacatgagccctcgcaaatttccttatccctaagctctatatcaaactcttccaataaaagttttgccctgtcatatttttccacagacaaatcgccaagctcataaatctttacacttgcaataccatcaccatctgactttattgacacactaagtgtaccctcgtcaaaggtatcattaagtgtaggaacaactgacagatcctccacatgtgcacaaggaacagcatacaaaaatacatctctgaaaatgcctgaaaatctgtaaaaatcctgatcctcacaccagctgcttgatgtccatttccatactctgaccgcaagcttgttctcaccctcgacaatataatcagtcagctcgaaatcagacggatcaaatgtgtcctcactgtagccgacatagtgtccattcagccagagtgcaaaaccgctctccactccctggaacgaaatacacaccctcttgttcttcatattctcagggattgtgaaatacttcacatagcttgcaaccggattaaaaatctcaggtacctcgcccggctttataaactcatcagcctcccacggatatgtggtattcgtatagattggcacgtcatagccttccatctggatatgtgccggaaccctgatttcatcccagcctttgcaatcatagtcagctgcctcaaagccacaaggagccagggactgattctttgcatatgcaaacttccataagccgttcatatcatatctcaggcttgattttcctttaattttctccagttcatttttatagcacacatgatccgaatgagccgcaagtctgttctgctcaaatatttccggatttttaatgatatttgaatcaaaattactcatatttttacactcctatctactgtatttattatttgatacatgtatgttttaaacacaaagcctcttataagacgaaggcaaataataaatattatttgccttcttgatttttaacaatattattttacttttatttaacagatcctgtaattccctctgcaaactgcttctggagaacaaagaatacgatcattgtagggatggagcagaaaagaacgcccatcatcagtacaccgtaatctactgtatatcctgctgcgaggtttgcaataagcattggcattgtgatagcatcaggcttattgaggattacctttggccacaggtatgagttccatgcattcatgaatgtgataactgcagctgctgcatatgttgatttctgtacaggcatatacatcttgaagaaaataccaatctcactgagtccgtcaattcgtgccgcctccattatatcgactgggaagtttctcgaattctgtctgaacatcatgataaggaacggcgttgaaatagccgggagcatgaagccccataccgtatttataaagccgagctttgacatcatcttgaacagaggaataagtgtagctacctgcggaatcatcatggcaagaagtaaaactgagaacagcttatcctttgccttgtcatgatatagctcaaagccgtaaccggcaagtgagcagacaagcagtgctataattgtctgaactgttgcattgataagtgagtttttcattccaagtgcaacgttctgtgatgcaaacagtttctttaagttctcaagggcatagccaccaaatgcaattctacctcttgcaacgtcaatagacttgttggtcgctgccgatatcatccagaaaaacggaaatactgagatgaacgaaactattacaagaaaaatgtatgaaggtataagccttttttgtattgatgatccatgttttttcttagtcacgcttgtcacctactttcagattgataaatgccagtatagcaaccatgatgaatacgataacagacattgctgatgcatatccaaagtttgcaacaccttcaccaaacgagccgttatagatataatgtgacatggtgattgtcgcatttgcaggtccaccctttgtcaggtttacagactcatcgaagagctgtaatgtaccgtttattgacatgatggttgtcataacaattgtaggtctaagaagaggaaccgtgatagaccagaaggtcctccagccgctcgctccatctatctttgccgcctcgtaaacagaatactcgatattctgcagaccagctaaaaagaacaccatattatatcctgtccatctccagataagagctactatgataataatcttagcgctccagcctgtaccgaggaagttaaagttgctctctaatattccaagtttaacaaggattgtattgataagtccctgtgttgcaaaaagcgatttaaaaatcaatgcatatgatacgagtgatgttgcacatggtaaaaatacacatgtacggaaaagtcctttaaatttaagatgcttgttgttaagtaactgtgccagtaaaattgccagtacaagcatgattggaacttcgataattaaatataggaatgtgtttccgatagatctcttgaaaaccgcatccttaaacattcttgtgtaattgtaggcaaatggattagcccactgcatatttgcacttgaaccggttttaaatgatgtaataacagcctggataataggccagaagctcattatgaaaatgagtattgtagccggagccagataaatccagccggcagccctttgtttacctgttatgctcattccttttttcttattcttcactataaaggcctcctaactataagtctttgagaaaaaacagggagccatttaatggctccctgtacatttgccatcaagctaacagattaaagtcccattgtgaatttaaggtcatcctctgctgtctttatctctgaatcgatatctgcaccgttctgagtaatattgataagtgctgtagcaagcttcttacgtgcatcgtaatggaaatcgctctgctcgattgtcttaacatttgcacccatctcaacgatcttagcgtaaattggctggttgttgaagtactcaacgccctcgttgtaaacctcagacttgcctgcaggtgtatatgtagtgataacaccaccattcttaagagcattgtcatatgtctcagatacacccttgtctgtataagatccgccaccgaatgtatatgctaagaatttcttagcaaggtctgtctgcttgcagttgcttgtgatgtaaagtgaagaaccaccgtttgatgcatagccttcaccaccctcaagtgttggaagagatgtaatctcccactttccactgttgtctgtaaccttctcgattgtaggaatgatccagtttccgttcataacgcctgcaaccatgtctccctggacagcctgatctgtgtaatctgaccagttatttgcaaggtaaagaacattgttgtcgatcatatccttaagtacctgcatgatttcttttaatttagcgttgtctacaaagtttggcttgccatccttaaactgtgactcaccctctgcctgaagcatcatgtagaacaaatcatttccgtcgccgtccatgcaaagtaagtattttcctgtcttctcgtatactttcttacctacctcgatgaaatccttccaagaaatacctgtcatatcatcgattgtgtatcctgcctgctcaagaagatctgttctgtaagcaaagataactgttccgttatcaacagggaatccaaagtgctctccgtcgattgtagagaatgataatttctcctggctgaaatcatcccacttaacatctgcatcatttgctgatacccatgcatcaggataatttgtatggtactgccggaagtagtgatcctgaaataatacgatgtcaggaagtgtactgtaatctcctgctgaacctgctgttgtaattgctgtctcaatatcagatgactgtgactgttcctcaatattgagtacaaaatcaggatctacatttttcttgtaatcctctgctgctgctttgagtgccgggatattgaagtttgcatcccaggcccatgctgtaagtgtatgaccgtcatctacggtctctaccttcttgcctgtcttttctgtgccatctcctgatgaagatgaatctccacatccggctgcaagtgaggcaaccattgttgttacgagtaataatgaaactactttctttttcatttttcttcctccctaataaaaatgatgtttttgcaatactccgtttacaattcattcataatcacattattttaattgggcattttgactatgaatatttgtccatttcttaattacatagtcattataaccatatacgttgtttctgtgttaacaaattccacacaattatatgcatattcaatcataaatgtacaaaattatacgaaaacatgtattttctaccatccctttagtgcagatatcctaaaattcaacagtttatgctcataattttcaggatttatcttccactgatatggcgaagtgtccaaaaatttgcggaaattacggttaaaagttgactgggttgtgaatccacacttttgtgcaataagctccataggctcatttgtttttttcataagctcgcacgccttctgtactcttatcagattcagatactccataggcggcatattgatgtatgattcaaacagtctcctgaaatgagtctcgctcatgttgcatagttccgaaagctcccctgcctttatcgattcgctgtaatgcttattcatgtagtcaagtgctgtggctatctgtgacatattggtaccctttacgatattattatcctcctccggaagctcatcatacctacgcaacagctctattacaattccctgcacaaggagctttaccgtcctttggcaataaatcttatgttcacgggtttccctgattatggcatttatatactcagccatagccgggctctgatatacgttagtcataaacgctttttttgatatagtcgtaactgcctcattctggaatgccgtattgtttgggaacatctcttctatcacagaatgtatgtcaataaaaatgtactcccagaaattcaccacctcaccatagctgactgtaacatgtggaaaattctcaggtataaatgtgatatcgccgtcatgatactggtaaatatcctcatccagatacatatttccatctccctcgcggcagatgccgatttcaagcagattatggaaatgcaggtgaaattcctcatgaccatacactctcttccaggattctccgcacagtacgagtgccgactctccctgtggcaactcatagaatctgaattccatcgtgtctttttttcttttcgccatatatactctcctttgtagcgaaatgcaaaatacgctgctgctattatagcagcagcgtactaatcactactttaatcaaaatcgaacttgtcgaatctcttgtacatagccttgtacttcttgcggacatcctcgttgccctgaagtacctcttcctctgtacctctgaactgacagcggatgcagctataaatacctgtttccttattatagaacatatcaatatcaagatccctcataaaacataaaggacatctgtaatttaatttgccttttccaagttgagccatgttgcaaatacctccttgtctttaatctgtttcttgtaaccaagcttgaacattggagagaatgcatatccttcctcaatgtatccctctgcctttgcagatggtgtgagtgaaacctttgtctgaattgcaggaattactgcgcttactgcagttgctccgtcaagctttgcatcacgacacttgtactcataattgatgctctgtgggttttctccctcacatgtaagtgtgatgcctgtcatatcctcaggatactctgttgttccgtagcatgctgtgatgtactcatcgagataaacctctgcatttggatcactcatgctaaggatattacgctcaatcttgatgtttgatgagccctcctcaaagtattcctttgtctgaagagtaagcttaacatcataaaactcaatatctacaggatcaagtgtaaggattcttgtcttcttgccatcaataacttcctctgaaaaatggctgtgtgtaggacagagacacaggtcaacctcctcaccgttgtgtgaaagcttggcacttcttactgttccagctcctgcatagtgtgtaaagtatcctgctctgtatttctcctgaataaggaatggataagatgcatcctgtacatgctttgttccgattcctaccggccactcaagctttgcaacgtatggacgaaggtctacgattgctccaccctgatccatgtttacgcatgctctcatgtatgggtcacagtaccagaagagctgcttgtctgagccgtaaaggatatctctccatggtgcacactcaggctcattgtagttacctgcgttgacccccttcttctctctgaagtaatcagcgaactctgacattgtcatgtcgatgagtttaccctctttctttaacttgccatagtaattacagccgtctgtgtatgactttaagagaagctcatatggctgctcccagcgtcccatcttgttcatccagccaggacctacgaacatcatgttgtatgaatatccgttattgtattttgcaaggtctctgtactggtcaatgaggttgtaaagatatggatactcccatgtctttgtatcataaatcattccacgaagcacgttctgtggatgtgttccgaagtttgagccgtttccgtcatagcatgcaataaggtcacgtgagagatgtggaattgctacgattccgctatcctcttccttatttgctgctggcgcatgtgtgttctgctttgatggaatccatggtgcccatgggcctccgtcgaagagtgtgtaccatgagttgttacatgtgtggtatgccttagggccctcctcccagcatgttgcaactgcacattttaccattgggtatttttcttttatgtagtttgtaaggtctgcatccatatagtaagagcctgttgactcaggatagaaaccgaatctgtcatggaatttctcgaaaacatcatttacgatagctttcttgtcctccattgagaacatccagatgcagaaatcctttgtcttatacttctctctaaactcctcacacggaagtccaaggagtgaaagtgctatctcatcaccgtatttctcgtgatcctgctttgcaagctctactgcctcatcattaaaaagtgaagcatatgtcatctggattgtggttttgagtcccgcctcatgtgcaagtctctgctgtgtcttgaagatgtcgagtgactctgtgataagcttcttatctccaatatcctcttcttttccctgtcctgtcactgttgctgagtactcaggcaccatctcagggcggtgaatgatgttaacaataaatttgtccatccgttgtttcctccatttgcttgtaatttaatttatttcttaggtgcgttttcgcgcaaccgtttgttctgaacttagtatattacagcattgcgattatgtcaatgtgcaatttcgacattttttaacttttgttttcaagcatttttcacaaatcagggattgggtgcgcgtttttacgcgcaacttttgcgcatcgatcgtaggtcggtacgtaagccggggcctgtgtggcagaaatttaaataaatgtttttaatcttgcgcttattatgttatcatgtaactgagatataattaatgattcattataaatagaaagaggtgtttatatgtgtagtattgcaataaaaataccagatgaagtattatacgataccaaaatgaccaaagatgaagctaatgcttttgccaagaaagctactgctctaatgctttatttaaaaaaccatatttctattggatattgtgcacagatagccggaatgagtgaggaagatttcatcaaatatctaagcaataataatatatctatcttcagttttgatgatgaagcagaatttatagaggagatgaataatgcgtagggtaattgtcaattcaacaccattaattgcattgtgcaatgcagacttacttaacattttatttcttctgtaaaaaatgcaataaccaaaattcaatcaaacggattctatataaatgaaaatatcattaaactagcattaaaacaggcaggtgaattatgattaaaatagcattctttgatgtggatggcaccctgcttcggctgggatataaagaattatccgcaaacactgctgctgcacttaggcagctccaccaaaatggcatcatcctttgtatggctaccggaagaagctacacaggtgtgcctcattttgatggaattgattttgatgtcctgctcacctttaacggctcattcgtcaccgcaggcaatgatatcatcttcaaaaatcctattaatgagcacgacaaatatcagataatttccaatctaaagcagatgaaccgcgccattgcaatcagcaacgagcatatgattgtcacaaacggtaccgaccctgatttagagcagtactttgcctttggcagcgaaaagcttaaaatcgctgacaattttgacgagataagcaggactgatatatatcagattatgtgctcctgcaaaaaagatgagcactcacagattctatccggcgcgccccactcacagataactgcatggtgggataaggccgttgatattattccgcttaacagtggcaaaggcaatgctgttgctgcagtgcttaggcattatggcttctcaaaggatgaagcaattgctttcggtgacggacataacgatattgaaatgcttgaggccgtaggcattggtgttgccatgggcaatgcaaaggacgaagtcaaggctaaggctgattttgtgtgccaatcagttgagaatgacggaatatatcattactgtgttgaaaacaaactgattttttagagaaatatacttatgaacatagacaacaatttacgacaactactcgaaaacgaaacaaaaatacatctcgcggaaatccgctttctctaccagaagctcgacagacagcttgggcttaacggtgcaagggttcctatcacatttggctttgatacggacaggctcggtgcatacactccgggctttgggcaggatgaagaagaatttcatttttcgctgcttttcatcggctactgtgtgacaaagcccttgtcaaaggatgacaggatggatttatataagcacgaatatgcccactatatgcaatataatatggatataccggacaagtacaactggcagcccggcatccacggaagtgcgtggaaatattgctgctcacttatcggagcagctcccactccttactacaaagccggtgaaggacttattaagcacgattatgataaggttctcaaaaagaaaattactgacaagagtattcctatccgcgacacatattcacgcgagcaggaataccgcaaaaagaaaaacagtactgtaaaatttaatatcaatgacgatgtcaatcatccaaagttcggcaagggcaccattgaacatatcgagcagctcgaaggctcagttcggctgcatgtcagattcggtgaagatcttaagaaaattgatcagaaatggctgcttcaggcaggcatgaaaaaggcaggtgcaccaaggcacatatagcgttatgctatatatgccgatgcacctgcttttcaaatacatgtgtagttaattattatcgcttattgttccttcatctgaacaagtaattttaattgttccatcaattacattatttcaagttcgtgaaaaatccttactatctcattccaggaagctatgttttcttttaaatataatttccccttttctactattttataatattttctctgtggtcccaatgatttttcactgtaatatacttccgtcaaccctcctttattcagtcttcttagaatggcataaatagtgctttcatctgtatccggaaaaagtccctgcaatattttaattatatcgtatccatatctgtcttcttgttttaaaagctgtaaaatacatatatttaagattcctctttttagctgtgaatccatttatgatttcctctcaaattttaattttaacaataaaattgtccccaaaatcagtgtctgaatatataataaactactatatgctattattttttcaagcccaagcgttctttctatataaaacatatgtaactgatttataaaatacattaaacaggtaataataccaagtatatgaaatatcgttataaaacccaatttcctgtttattatatatttctttaagatgatgtaaataataatacaactcagaataattatagctgttgtaactaataccacataataactccctaagccagcctcattatttttcattaccagaaatacctctgttaataaaataaaaaagaataatccgattaataacagatggtttttaaattgcatatcacatgttaattttgattttttaagaataaacaaacctgcaacaaatactagaacattagctatcagagcaaccggataaaaattccagccgtttttatcaaagtatcttaacaaactgacgcatagcacataatatataaccagcgtggcaattgtctgtaataaaacactactcttcaatggaaacgtatgctcttttccttcttttgaatctttgtataaatttctcgcgatatcaaacggttttcctaagccggaacatatttcgtactcgcttttttcagccatttcttcattttcgaaccattcttcatagtctttaattaaactatcacagtcatcatccccaaaataaaatgataagctaatataaagtttctccaaaaatttcttttttgaattttgcttttgcattataacaccctctctactgattaacactctactgtttattagtcactagttaagtataatatatttcatatcttgcattttgtcaatacaaaaatcatgtgactacaatatatcgcagtcccatgattctaactatatcttatatttttgtttgtaactatttaagtcttaagtcacattgagaacaagaaaatctacatctcaattgcaatcgtatatgacttctcaaatttctcaccctgtgccagcgaattaccatactccctgtcctttaattctccgacaaagcctgctctgtcacatcggccataccacggctcaatacagataaacggtgctcccattcctgccggtgaccacagaccaaataaaggcgcatcaaatgacaccgtaaggtatggcttcttatccggtgtacacaggctcacctttgaagcctgtctgttttctattatgagcgcatccttatcaaacatatgctcatctatctgacagtatccatccgcatccaccttaagcagattgtcatccttgtctaaaagtcctccgtcacagataagtccgtaggtgattgctttgtctgtgtcaagcttcagataatagtctgactgctttccctgctctgcgaccggacacataaatgccggatgaccacctattgagaaaagtaaatcctttttcgcaggatttgtcaccctccaggtcacttttatctcactgcctgaaagcttatagccgatttcgagcacaaactcaaacggatattttgcaagagtctcatcatttgatttaagtaaaaaccatgcctcatcctttgtctgtgacacaagctcaaactccatatcccttgcaaagccgtgctgtcccatcggataatctgtcccatcaacggtaaacttcttgtcctttaagctgccgacaaacgggaaaagcaccggtgcgcttctcttccagtatttctcatcggcatcccacagatactgtgtacctgtttccttgccggtgatgcttttaagctctgctccgaagctgtttatcgtgagctcaagtgattcattttccaatttaatctccatcacatatctccttttatattttttgtagtcagtttttttacatcacaagcagtccaattactcttacaataaatgctgccacccatgcaatcgcacactgcaaaagcaccacgctgactgcccactttgcacccagctctctctttatggatgctattgctgccacgcaagggctgtagagcagcgagaacaccagaagagatgcagctgaaagtgttgtgagtgctgtcgtgaccgttccgccaaacagtatctcaagtgttgataccacgctctcctttgccatgagtccgctgataagtgacgtgcatatacgccagtcgccgagtcccagaggcttaaagacaggcacgataacacttgaaatagcggcaagcatgctgtcctttgagtctgttaccatgttaaagtgtatgtcaaagctctgtaaaaaccatataagcattgtagcaataagtattactgtaaatgccttctgcaaaaagtcctttgccttttcccagaggagctggcacacattcttggcgcccggcatcctgtagtttggcagttccatgacaaacggcactgcgtcacccctgaacaaagtctttctgtagataaacgcgaaaagtattccgacaattattccaaggaagtacagacctcccatgacaagtccgccatgcttcgggaaaaatgcactaacaaagaatgcataaattggcaattttgctgaacagctcataaacggtgtgaggagtatagtcattcgtcggtctctctcacttggcagtgtacgtgtcgccatgacagctggcaccgtacagccgaagcctatgagcattggtactatgcttcgccctgaaagtcctatcttacgaaggagcttgtccatgaagaatgcaaccctcgctatgtatccgctgtcctccataagggataagaaaaagaacagtgtcacgataatcggcaaaaagcttaatacgcttccgacaccctgaaagatgccgtctattaccagtccgtgcagcacctcattcacacctgccgctgtgagtgccttatccgtaagcgcggtcagtgctcctatgccctgctccaaaagccactgaaggcctgctccgattacgttgaaggtcagataaaatacagcaagcattatcactataaagcacggtattgccgtgtatttgcctgtaagaacacggtcgatgcgctcacttctgatacgctccctgctctccttcggttttaccacggtgctctcgcatattttctcaataaatgtaaagcgcatatccgcaattgcagcgcttctgtcaaggcctcgctccttctccatctggacaatcagatgctctattgcctctttctcattctcatcaagatgaagctgctctaatataagcgcatctccctcgataattttggtagcagcaaagcgaatcggaactccggcgagctttgcatgatcctcaatcaggtggctgaccgcgtgtatacatctgtgcacggcaccgccaaaatcattctcatcacagaaatcctgtctgcccgggcgctcctgatactttgcaatgtgtatcgcatggcgcaccagctcatcaacaccctgattcttcgcggctgaaatcggtacaacaggcactcctaacagtccctcgattttatttacatcgattgagcctgagtttgccgtcacctcatccatcatatttagagcgataaccatcggtatatccatctcaagaagctgcatggtcagatacaggtttctctcgatatttgtcgcatctacgatatttattatggcctttggcttgttatcgagcacaaagtttctcgacacaatctcctcattagtatatgggctcattgagtaaattccgggcaggtcagtgattgatgtgtccggatgttctttgattgcgccatcctttctgtccaccgtcactcccgggaaattgcccacatgctgatttgagcctgtaagctggttgaaaagtgttgtcttgccgcagttttggtttcccacaagtgcgtacgtgagcttctcaccctccggaaggggattgccactgcccttcacatggtatttgccctcctcgccaagtccgggatgggctgtgttgcttatctttttagggccctcatgctttcttgaacggctgtcaattaattctacctcaatctgtgccgcatcatcaagcctcaatgtgagctcatagccgtgcacctgaagctccatcgggtctcccatcggtgcaaatttgataactgtcacttcggcctttgggattactcccatatccaggaaatgctggcgcagtgcgccctcaccgcctactgtaagtattctggcactctgtcctatgccaagttcttttagtgtcattttatcgcttcctagtgtatttattgataatttttctcaacttatcacaaatatcttaccacaaagcgtgtgccactgcattcatttttttcatttaatacatcttttttacaatcctccacaaggatatatccattgtcatgacgcacaattgcttccgcgagcgaaagtcctatgccgatgctgtctgccggctgtccgctgccgctgtaaaaacgcgtaaaaatatgctttttgtcctcatcacttatggcttctccatcgttttgcactgttatctctgcatacatctcatacctgtaaaagcctatctttacctcactctctgcgtgctctactgcattttttactatgtttgtaatggcctcacactgccagtatgcatcagcatgtatacaggcatccttatcagagccttcatctatggacagccttatgtctctcaaatcgcaaagtgccataacattgtcagctgcctcagacacaatttcagacagcagcgtatccttctcatcaaactccacaacatccgcttcaagccttgaaagctttaagatagcctgcaccatatgcgatatattatccacatcacgctttgccctgcgcattatcctgcttctgttttcaggtgccatatcaggatttccttccagatttatcgaaagtgatgtgagcggtgtcttaagctgatgcgatatgtcagaaagcgcatcctttagcaaaagcttgtctgcctttgcattttccgcagactccctcaaatagattgctgtcttgtaaagctctccctttagtatagaaatctctccctctgtgctatctgccataaaaagtctgtagtctccctgatttatgcggcgcagataatccgcagcctgtctgacctgtcttttaaagctaaatcttataagcacaatgtaaaggcaaaagccccctgcaaaaagcacaacaagaaatatgtctagccaaagcgctcctttaagcgctttttcatttgacaaaaccgcggaatccttttccatatcaatgccgtatttttttaagagcgtctctgcgctttttaaatttgtataatcactatcgaagctgctgtcatttagaatcgcggctatgctgccatctgatacatcgggatatttttcatgaacgagtgcacatagcttagccactgtgatgttatagttttttgtatacgccctgtactgaaaaaagacggtaaaagccataaccgtcacacatatacatgtatatattatcgcaaaatacacaaaatgttttctgttctctaaattatatttcttctttctcatgctttcccccgggaactgtctctgtcggtcgatactgtttaaagagcttcatctgaatcaacacgatacccgattcccttcacagtctttatcacatcctcaccaagctttgccctgatgcgcttcatatagacagtcactgtatggtcgtacacatcgttgcctgttgcctcccagatgcagtcaagcacggcatttctggacacagccttgtcgtgattggtgaaaagcagatcaagtatgcggttttcaagacttgaaagagcaatcacctgtccagcccttcttgcttcctttttgtccaaatcatagcttatgcttcctgcgtgtatgacagatgaactgtcatcacttttccttcgtaaaaatacgcggtttactctcgccacaagctctcttactgaaaaaggctttgtgatgtaatcctccgctccaagctcaagtccctttactatatcattttcctcatcccttgcggtaagaaaaatcaccggtgttttttctttttccagcctttcgctgtaaaaatcaaagccgttcccatccggaagcgacacatcaagcagcacaaggccggggtgctcactcaaaagcgccccagcctcctttaaattgcctgctgtcaaaagctcatattcaggttctgtaaaggtatcacacagtccctctgttattcctttattgtcctctatgagaagtatttttttcatatcagctcccgcatttcctacagattttcatttttgattgtctcaataatgttattgtgtctaagcttcgtcattgatagtttcatgatagcataaatcagcattattacaaccactatacacaatataattgctttatacggcggctcataaatgattgcgtcatccatcctgttcatcataacacataagagatagcttattaaaataccaagcggtacacctattacaagtgcctttacagatataaatacactctcgagcctgaccattccagcaaactgcttatctgtcattccaatgcttcttagtgttgcaaactcgcggcttctaagctccattccggtgcttaaggtattgatgatatttgtgattcctattaaggcaataaccacaataagtccgtatgcaaatactccaagcagtgtaaagagagacttttcatcgcgcatctccttatccagattgctgacataaaaactaatctgcgaatactcagtatttccttccgtctccttttcgaatgtatcctgatattcatctgcattttctgcaaccacatatgccgaatatatcgcatgtcccggtttgagctcattaccgctcttgccgtcagcccataggctttcaaatcctttttggttcataaacaaaagcgtggtattgccgtagcccttataacctgttggtaccttgtctgtgacacctgcaatagttacatccacagtctttctgactccgttatttattgtttcctcgtcaacgtatccactgttatcctctgtgccgctttcagtatcaccttccactgcattattatcatctgtgctgctttcagtatcgccttctgctgcattgtcatcagaagaagcatcatcataaacattatagccacactcgattgtatctcctgctttatatttgtacagctccatctcttttttgacgtattttgagctattctcattatacacatcaaatgtgcctttattcacaagaattgctcctgcagctgcattttttatgcctgcgtcggacgcatacttatcatacgatttgtcatccaaaactgtgattaaaaactcttgtgagacatcctcactgtcatcataaagctgcccgcaatactctccatattcctttgtatactccggcttatctacatcaaaataataacctgctccaaccagataatcctttgctccttcaatgccactcaaaagctcagagagcttttcaatatcaaggtcctttttacatgacatatttattccaatattgtaatctactgatgcatatgacatcccaacaacgctaaaggccatagacataaagtatgatatcacaataaaggttactgagcagataacaatagacgtcactgtagttctgtacttttttttgttcctctttatattcttatatgagataacgcctccgataccccagattctgcctataatcgccggggtcttaagctttgctgactttattttaatctcctttgtgtttcttattgcttcaagcggtgtgacctttgccgcccttcttgcactgcctgttgctgagaaataaatggttgctatactcattatcacagcaagaataagtgcaggcagtgatgtgtgaaagctcaaagcaaagttaagccagcctgctgacagcacatttaccaccttgacaagtataagcgatgccaaaataccactcatggtacctacaggaataccaaccactccaagcattgctgcctctgtcttaacgctgctttttatctggcgcctcgtagcacccacgcttgcaagcatgccatactgcctgattttttcagtgattgatatgttgaagctgtttttgatacagtacactgatgtcagtatgattatcaaagccacaacagcggccactgtaaacagtgctttaaatgaaccgtcaatcgggaaaacgcactcatagcttataaggtatccattcatatatatatcatattttgcattttccatctctttaagaaacctgtcactctcctcagcagacatttcaacagatgaattatttgctttctcaaacagcttttcatccacaccaattatatcagcagtcacagcatccttgtttcttaaagcctttttagtgtatctgctgtacactgtgagtgtagtgtcagcttcgcttgcctcactctttgtgccgttatcaattgctgccagttcatcagagtatgtgacaaatgtatatccggcggcactatagtcctccattccatagcccggtctttccatgatgcctaccaccttgtagtgctttgtcacagtatcggtaagtgtctctgcatcatgctcatatgcgcagttttccgatatgacactttcggtgtttgaatcatatctctttccgatatcaagtgttatctcatctcccacctttatgtcgattcgtccgtttgtctttaaatgccttggaatgactatctcatcctcattttttgccatgcgcccctctatcagtttaaagcagcccctctcaaagccggcctcatctgttgccatgacatatgcatacggcttatcctcattcttgcagtcatctagctttgcaaagcccattcccattgtctcaaatgtgctttcaatatttctgttgtttttaaactccgaaagctcagacattttcacattcgaaaatttcacatgaaagtcgccgcccttttgcttctggtattcgatcacactgtactgaaagcttgacacaagtgtgacaagcgccgacaaaagcgctgttgcaagaattattccgactatcgtgacaatagttcttttcctgttgagctttaagttttttaacgtgagtgtcttcatcaaattcatctgattttaccatcctctatcattattgtgcggtcagccgcctttgcaagctccatattgtgtgtaatcataataattgtctggttaagctcacggtttgaggtctttaatagatgcataatctcgttgcttgccttggtatccaggtttccggtcggctcatcagctagcactatagatggtctcgtaatcagggctcttcctatagatgtgcgctgctgctgtcctcctgaaagctcatttggcagatgagtgcgtctctctgtaagtccaaggcgcaaaagcatgtcatccatctgtgctttttccacctttcttccatcaagctccatcgggattgccatgttttcctccacatttaatataggtatcagattataaaactgataaatgatacctacctgtcttcttctgaatatggcaagctcatcatcattcattgcaaaaatatcagtgccgtttatatacacctttccgcttgttggtctgtcaacacctccgagcagatgaagcagtgtggattttcccgagccgctcgccccgacaattgccacaaactctcccttttccacgctcaatgacacatcgtccaaagccttgacctgattttctccggctccgtatatttttgataagtgttctactctaagcagttccatttaattctccttttcttctctatgcatttttgagtgctgtgcggtccgtcctttaaagtgcagccgccccgcgatacaagtgtataatacattatgtaaagttacaggtaggttacttttaaaaaatattacagcataatataaaaactccggtcagaacaaaaaattttctgtgccggagcttatatattatatgttatatattatatgttttatatcatatgttttataattatctatgccaataattatttctgcttatatgaagacaaaaagtctgcaagcttgcctgtggcatcctttaatatctctgttcgaggcagatataccactctgaagtgatccggcttatcccagttgaagccgccgccgtggattatgagtatcttcttctcacgaagcagatccagtgcaaactgttcatcgtttgtgatgttgaaccttgcagtatcaatctttgggaatatgtaaaatgctgcctttggctttactgccgaaattcccggtatatcgtttaatgccttgtagacatactctctctgctcatagattcgtccgcccggcacaatatactcgcctacactctgatatccgcctaaagctgtctgcactatcgactgcgccggaacattcgagcaaagacgcatgtttgagagcatgttgagaccctcgatatagtcctttccgagcgccttgttgccgcttaaaaccatccatccgatacgatagcctgctatcatatgtgacttagaaagaccgctgaaggtcacacagaagaggtccggtgcaagcgacgcaatagacacatgctcatagtcatccatcaccagcctgtcatatatctcatccgaaaaaatcataagctcgtgctctcttgccacatcaactatctgctgcagcacctcccttggatagagcgctcccgtagggttattagggtttattattacgattgcctttgtcttgtctgtaatcttctttttgatatcctctatgtccggataccactctgactgctcatcacagatatagtgcactgccgtgcctcccgcaagtgtaacgcaggctgtccaaagcggatagtccggtgccggcaccagcacctcatcaccattgtcaagaagcgctgacatgcttaagtttataagctcgctaactccgtttccggtgtagatatcctcaaccgtcacattaggaagctttttgagctgtgcatattgcatgattgcttttcttgcagaaaaaagtcccttggagttggaatacccctcacagtccgtgagctggcgagacatatcatatatcacctcatcaggtgtcctgaagccaaacggcgcaggatttcctatattgagtttcaacacatttgtgccgttttcctccatgcgggccgcctcatccaccaccggtcctcttacatcataaagcacattatctaattttctggattttccaaattctctcatcctgacaatctccttttattttcgtaacaattcctgtatccgtaatatatcctgctagcctaaaagctcaaaaacagcctcagcgtcaaataccacctgctttaccttatcaacctctatctgataaagtgcatttgctgccagatgctctgcagcctgctcgaggtctcttatacccgatgtgttctcgtgaagcttaatcactgcatcaagtccgtcctctgtgagaacgcactcctcctccttcattcccattcgctcaaataccttgcgcagggcaaatctctggaagatgaccttcttctcttcatcggtatagtccggaatatcaatcactgcaaaacgtgacataagcggtgcagaaatctgggatttatcattggctgttgcaatcggatatactccgacggtcggcaccatacactccatatagttgtctgtaaatcccagattgtcaagcagtgtcaaaagcacatctgccggatttccgttgccgtttttgcttgaggccttgtcgagctcattgatgataaatacaagatttgactctcccgcctgtgaaaatgcctccataatgattcccggctttgcgtttgaatagattcttgagcttcctgtgagctgctctgcatcatttatggagctcatatcgagtgtggtccatggaagcttaagtatacgtgcaacagcatatgcaatctgtgactttccggttcctgctggtccacagagcagcagtccgtaggcaggaagtgtatgagtcctgtttatctggataatggtctcaatgattctctgcttcacgctctccatgccatagagctcctcatcgagtatgcgccttgcctccacagggtcaattgcctcaaagtaatttcccttccactggatattcatcatgatggaaagtgctctctgtgcatggcgtctctcctcaggtgatacctcgcttgaacgcgcaactgccagatttcttctggcccacagcagtatattgtcaggcagtgtacggcctgcacaggtcatgaaatctgtgatgctctgtatactggtgagcttcatgctgtcgccctcttcctcgtaatcatcgaggtcaggttcatcctcaggcatggtgctggcaaagagcctttccatcatatactgcaggaatccgtcctctgcagacagctttgtgcctctgccgagagacacctccctcaccctgtatactgcgtatccgtcaggtgtattgactcctgaaagctgtacctttatgtgattttcgccaagccacttaaaaaggctaacgaagcgggaatcaatgcgcaggatatctgcactggtcaccccatcaccattctcaaattcaaaggatgtacgctttatcggatttgtaaacataccgagcgcatgatgcgcccactccttttgcttattgtctatcacaacaatcggtttatcggccgatgccttggtctctgtcgaatgaaatgtctcatatgtacactccggatgctcgtttgctaccggtgtatcgctaaaatcaaatactggcatttttattcctctcttttcgtaattgtattcttcatcataccctgtcaaaggctatgtcctgtaccacctcgcccgcgatgataagtcctgccactgatggtacaaatgcaaggcttccgggaatatccctgcgctctgtgcacttgtgttcggcacccggcgggcagatgcagttgcttctgcagcttatggacatatcctctatcggtcttgtaggcttctcctcagagtataccaccttgagctttttcacgccacgttttttaagctcacggcgcatgacctttgcaagaggacacatgctggtcttatatatatcagccaccttaaatgcacttgcatccagcttatttcccgctcccatactgcttatgatagggacatttttctcctgtgccttcatgacaagcgcaatctttgctgtgaccgtatcaaccgcgtcaactatataatcatactcttcaaacggaaattcatcagcattttccggcaaaaagaagcacctgtgcgtcacgacactgacatcaggattaatatcatgaatcctctcctccatcacatctgtcttgtattttcctatggtctttcgggttgcaattatctgcctgtttaggtttgtaagacaaaccttgtcatcatcgataaggtcaatcgctcccacgccgcttctgactagtgcctcgcagacatatcctcccactcctcctattccaaatactgcgactcttgcgccctttagcctatccatcgcctcttttccaagcaaaagctgtgttcttgaaaactgatttaacatttatttctccttttcatccctgaccacgccgacaccggcagaaatcaggagtcttactgtatccttaagcatactccagtcagcctttgacagctcatcggcagcctttatcatctcaatgagctgcttaaatgacatctggtcaaggttctcaaaattggagtccgatgcaattgaaaaaagcacatttacaaactgctttcgctgcgcctcatccatgctgcctatccagtttctgagtgtcttatcaaggcgcacactgtttttgtccagcccatccgcctttatgatacttccgcccattatctcccatgaaaaagcatcatgctgcagcggtcccgaattacggcttcttaccacctcataatcgtccacatgctcaagcaataagccaacaatagacgactgcggcagaaatgtctctattctgtcaaaaattcttttgtagcctgccgtatatatcatcttgtgattgaagcccggcccatcaaaattataaacctttataatggcatcctgcacctctttatccacatgcatggccgcaaacacagccagatttccaccctttgagtgcccgcctatccacagtcttcttgcacttatgcttttattgttgatattttcatcatctaaagctttatcatttatggctttttcatttatgcccctatcatcattgcatatatatgctgccacctgctttaaatatttttttgccttgttctgtcccggtgtctcatcgagatagcttagattaaagttttccttccagccgaccacggaatggtctgtaccactgtaggaaatgaaatatgtgccgtcaggcagttctatcgtaaccgcagaaaactgcgactcctctttttcactaatatcgtatatataatatctcaaaatgcagtcagcatagcgccttgagtgcgccagcttttgaagcagcctcgcggagtggcggaaaagattaggcatctgctcaatctcatcatcactgtggtccgcgcagtaaaggcttgaaagctgttttatcgtaaggtatgacttctttgcatccggcatatatggcttcatctgcacataaataagctgtgaaaaaatcagtccgtccacctcatttacatgcacctcatcaaagcctatgtctccacgccaatcaatataatccatgatacctgccatacaatgccctcctgaaatatatctgtcttattcatcatagtgatctaggaagctgtgctttatgccatcctttttatatgctacaaccgtagccagatttacattctccacgctcttaaatatatttgcctcgacaaaaggattcacctttttaagattagcgatgagctgctttatctcaacacgctttgagcggttttcctcattattgcaggtggtacaggtatctgtaaacttgcaggcacactgtatgaaatgcagaccgttgtaatcacgccatgccttgatatcgtcctccctgaccaggtaaagaggcctgataagctccatgccctcaaagtttgtgctgtgaagcttaggcatcatggtctgtacctgtgcaccatagagcatgcccatgagtatcgtctcgataacatcatcatagtgatgtccgagcgcaattttgttgcagcccagctcctttgcaaatgcatacagatgtcctcttctcatcctcgcacataaatagcatggcgatttttcgatatcatatacagcatcaaatatatctgactcaaaaatagtggcagggatgccaaggttcctgcagttttcctctatgacatgcctgttcgcctcattgtagcccgggtccatgacgagaaacttcacatcaaaatcaaacttgttgtgatgcttaagctcctgaaacagctttgccataagcatggaatccttgccacctgagatacacaccgcaatcttatcccccggttttacaagctcataggtgtttatcgcctttgtaaacttgcgccagatggatttcttaaatttctttctgatgctttgctccacatccgcctttatatcgcgctctgccacctcatcctctttcatggcatcaagcagccagcttatatagccgccctttaagcttgccgcatcaaaacctttttctgtgagatactctgccacatccacactcgtcttaccacggctgcagactatgacaagcttcttatcatgcaacaccctctcatctgactctattttctctgcctgaatattgagtgctccctttatggcaccgtgcgccacctcttcctcacttcttatatctattatctgatagctgttactatccagctttttaacttcttctatactaagctgcattttatttctcctatattatttccgcaatgactttatttcctgaaatatcctgtactcataatatgccgtcaccacaaggatgagccctatcataatgaggctgtatacatcgcggattgctattccaaacgcatcacacacgcatggcaccaaaagccccgcagtaaaaacaagctttacaaacatcaaaagcctgagtgaatactttctgatattgcccacacacagctccgctgctatgtgatttagcttttccggataatgctgcagccatgtgattgcaatgtatacaagcaaaagcacaagtatattggccacaaacttaaatacctgtatgtgatagcacactccataataaatctgtaagcctatatacgcaagagctaaaatagcatctattgcctcaagcaccgccgaagcaaaggtcatatctctttttctcatataaatctactacctttcattaacaccttaaacacataaaataaggtaaaacgatattgtttttctttaaactatctaattttatcatattatggactatctttctagaaaaattgtgatataataatcaggttaaaggaattttatttaaaaattaataatacaacgaggtttaatcgaaaatgagcaaattaacaataccaaagaactattcttcggcactgaatcttcacgatacacagcttgccatcaagactgttaaggatttcttccagggcatgctcgcacagcgtctttccctgacacgtgtttcagcaccgcttttcgttgatcctaccacaggcttaaacgataacttaaacggatatgaaagacctgttaccttcggcatccttgagcagggtgacaaggaggctgaggtcgttcactcccttgccaagtggaagagatatgcattaaagaaatacggcttctctctcggcgagggcatctacacagatatgaatgccataagacgtgatgaggagactgacaatatccactctatatttgttgaccagtgggactgggaaaaggtcatccgcaaggaggacagaaacttagacttccttaaggaaacagtaaagacagtatacaaatgcctgcgcaagaccgagcagtacatggctatacagtacgactacatagatttgattctgccaaaggatatcacctttatcaccacatcagagcttgaggaaatgttcccggacaatactccaaaggagcgcgagtattattttgcaaaggcaaagggtgcaatctgtgtaatgcagattggtgacaagcttgcaaacggagagcctcacgacggacgtgcccctgactatgacgactgggctttaaacgctgatatcatcgtgtactatcctgttcttgatatcgcacttgagctttcatcaatgggtatccgtgtagatgaaaaagccctaaaggaacagcttgacaaggccggatgtcctgagcgtgctaagcttccattccagaaggctatcctcaacaaggagcttccgtacactatcggaggcggaatcggacagtcacgaatctgtatgttcttcctcagaaaggctcatatcggtgaggtacaaagctcactgtggcctgatgagacaattaaggaatgtgaggagcatggtattcaattgctataatctgcataccatactttactgtttgttattaaaaacctgctgtgtcagacaagcatgacacagcaggttttattatctcttattttttaatttttccatatgcatcacaaacatcagcataaatgcatgtgttgctgctattatctacacaaacatcctccatgcagccctgatctgcgaactcagcctctcaaactgccagtgggtattgctctttatgatactgtttggatcatttatagtaaagccctcatcatcatagcctgtgatcaccataaaatgtccattgtctgtgaaatctcccggaccgacatttacgactatcagattgccctcatcaagcttttccttaaaaatatcctcatttacctttacgctcttagcatttacgccgaagtgcctgcagcccttgcttataagattccatgcacttccggagccatccacactgtagccggcctcctttgcatactctgccaccgcaagaggggacgcctgtgcatcatgtgtcagatataatacaaccatcgaaagtgcagtcggaccgcagccactcgccgcaaaataattgccactgtacttttcatagccccatctcttatcccactgctgcaaaagaggtactgtatcctgcgaagcctctgcagtcagatcaatatcatgctctttcgagtgctccttaggatactcatatatgaagtcaattgcctcatcatttctcttggcaagttcctttagctgccccggatactttgcactgtgaagtatctcatcaagcttcgtttccttgtcaggctcgctgtcttgctccgcagcgtttacatcagcctctgagctgttttgatttttttctgaatccattttagatgcggtaagtgaattattattcttctgcacatcaacatctcttgattgcgtcttattatcagcacctaccactgcatcagctacgggagctaaaagctgcatgccacacgccagaaatgttgttatgattatcgctgcacaaagaactattgcgcctattttcatacgcctgtcgcggtgccttgcacgttttatgcttccctgccttctatgagttttcttatgtgtctttcccattgttctcctcttactattacagcttatcaacctcatccatccagatacgtccacacgcatcagaaggcatccttaggtctcctctcggtgagaccgccactgttcctacctttggtccatccggcagacatgagcgcttgaactgctgtgcaaaaaatctgcgatagaagttcttaagccatttgagaataaactcatcatcatattttccttcaaatgctatccttgcaaggcggtaaaccttggcaggagcatagccgcagcgcagcatattgtaaaggaagaagtcatgcagctcataagggcccacaagatcctctgtcttctgtgaaatcttaccgttttcaggtggtaaaagctcaggagaaacaggtgtatcaagcacatcaagaagtgtactttccagcaaatcgctgccgcaggtatctgcatagtattttaccagatggcgcaccagagtctttggaaccgatgcatttacagcatacatggacatatggtctccgttgtaggtagcccagccgagtgccagctctgacaaatctcctgtacctataaccattccgttttccttgtttgcgatatccataagtatctgtgtgcgctcacgtgcctgtccattctcgtatgtgacatcatgcacagacggattctgtccgatatccctgaaatgtatatttacggcatcctttatatccacctcgataaatgtagctccaaggcatttaatgagatttaccgcattgtcatatgtgcggtctgttgttccaaagcccggcatagtaactgccgctatatccttgtgatcctttcccaaaaggtcaaacgcccttaccgtgacaagcagtgccagtgtggagtcgagtcctcctgaaataccgataactgctgtcttgcagttggtatgctctaatctctttttaagccccatagcctgaatcataagaatctcatcacagcgtctgtccctgtctgtcttgtctgcaggaacaaaaggagccggattcacatagcggctaagagtggtatcctttacctcaagatcaaactcagcccatctgtgatcatcctcgacaacaaatgttgtcatcctgcgcctctcagtctctattctttctacatcaaactcgctgtatatagtctcatttgtaaagcgctttgactcggcaagcacatttccgttttcacagatgagattgtgtcctgagtagaccacatcctgtgtggactcaccgtctcccgctgacgcataaatatatccacagattaatctggcagactgtccgctcacaagctctctcctgtatattgccttgcctgtcacctcatctgatgcagacagatttacaatcacagtggcaccagacatcgcgtgtctgatgctcggcgggttcggagtccaaagatcctcacaaagctccaccgctatcttaagctttggcagctgcttgcagctaaaaataaaatcagtatctacagacacctgctgtccatttttcagtgtgacatatgtgcttaagttttctcccgatgcaaaatgccttgcctcataaaactcattatagtttggcagaaatgtctttggcaccatggcaagcacctctccgcgcgatacaactgccgccatattatagagcatgccgtttatctcatatggaagccctatgaaaaatatgccgtcaaggctcctgctgtaatcagctatccctataagctcatcctctgctgcagctatgagcttatcctgccagaaaagatcctgacaggtgtatccggtaatgcaaagctccgggaaaacaaccacctttgccccgttgtcagtgcactccttcataagagctttaataagctgtccgttgtatacagtatcagctacctttacctttggtgtcgctgcagcgacctttatatatccgtccttcaattagcgcatctccttcaactcatccaccgtaaactcatatgccttattacagaactggcactttacctcaatgctctcaccatctgcgataatggaatcaagatcctttttgctcagagtggaaagtgctctgctcacacgctcctttgaacagtcacagtggaagcgtgtctcagtcgtatctgtgatttcaagcccgaaatcccctaaaatttcctcaagtatctgctccggagtcagccccctgtcaagcatctgtgtcacagaatcaatctctgtgattttcttttcaagcctgtccacaacctcatccggtgtaaacggcataagctggatgataaatccaccggcctgctttacgctctgatccttatccacaagcacgccaagaccaaccgccgacggaatctgctcagatgtggcaaaataataggtcaaatcctcagctatctcacctgttttaagctcacactgacctgaatacggctcctttaagcccatatcctttatgactgtaagtattccaagatcaagcgctccacccacatcgagcttgcctgctgcattgagtggcagctcaacctgtggatttatggcaaagccctttacattgccgtgcgaatctgctgtgacggtaagtccctttgcaggtccgctgcactgtatctgaagagttatgatatccttatcgcccttcatcatagctcccatcatggctcccgcagaaagaagtctgccaagtgccgccgtcatgacaggtgttgtcatgtgatcctctctggcggtctccaccatctcctttgatgttacagcaaatgctctgatattggcatccgccgctgttgctcttactatataatctgacataatttacctctcattatctaattctatgctttatgtgcaattacagtgaccttctcactgtcacacttcacctgatcgtctgtgtacgcatcatacaccgcatcaaacacaagtcccgactgctcaagaagctccttaagctctgaaatctcatagcatctctggaaatgagtttcctcaaacttcttgtagatgtcatcctcatcctctgactgctcctttataaaaagtgtcaggtcatactcgtttattttctcatcggcatcataataattgtcccatataaagctgccctcatcacggttttcagctatggtattatcagccatgagcacctcatatttgtatggagtattgatatcaaatataaaaatgccaccctctttaagactttcgctcacgcagaaaaaaactgcctgaagatcctcaggctcaagaatataattgatgctgtcacatgcgcttacgacagcactcaccttttctcccggttcaaactctctcatatcctgcatcagataaaggattctgtcatcctctctctcaagcgccatatcaagcatgtcaaaagaattgtcaatgcctatcatatcatagcctgcatctgcaagaagcgtggtaagctttcccgtaccacagcctaagtccacgacatatccactgtctatgccatttgcacgcagtttttcgacaatatatctgccccacttctcatatggcacattgtccatgaacatgtcatacacccgggcaaaactcgtgtatgcttccataattacctcatttcgtgtttctatttaccgtaatgatatgagagtcaaaaggtattttgcccctcatttatgattaatcagattactacatgctacgcattcccgtaatctgactccacctcgaaatccgctaattttctgcgtttccgcagcaaattgctactttctcggtgtagtgcgggtcactaaggtatacatcgaattgcatgcaagcatgcatcgatgataccttttgaccctttaatcatataataacaattaaatgtctcaaaatcaaggttgatataaggcacaaaaaccattatactaagcatatgattgataattacgaacactacataacaaaaaacatcaaagcattttacaaaaggcgtcttttctctccgattgtatacatcattctgcttaccgtgctatggtttgcattttcactcggagatattttatcgcccatacacattgacgattctgtcagctttgaagctgcatacaaggattcggacagatatgtaaaaaccacccttaaaaagctttactttaccggctacaccatgaaggacggcaacgatatcaagggctattactactactgcatgcgtgataagcactgctctattgtactgcttgcaccatccacctgtgaggagggtctgccctctatcgacaaactcacggtggtcggtaaaatcgtaaagggaaagggcacctacacacagtttgtaaataaactgtctaaggatctgagttgggattccaagggactctccgataccataacaggctactatcttaatgagcctgagtaccatttgaaaactactatttttatgtttgttttttattttggcactctcatctatgctgttatcagcctgatattctacatcctatgcatcaggtttcctgttttggcaccggcatgtcagaatcttgttgtatttggcaatccgcacaagctgcttgccgaggctgaggaggagcttgcgacactgccacagcttgccaccgaggacatgtttatcacagagcactattttatcatgacctcgccttatggcaatgccatcgtgcctatcaaagagattttatggatttacaaatactctaccctgcacaagattctgtggtatcatttcagcatctcatatacactgcatatttccgcaaataagcatctgtatattcattgtccgaagaacacgaagtctgatatcgatggtatcatcgattatctggctgaggctaatcatgatattctggttggtttcagtgaggaaaacagattgaaggtgcaggctgttcaggggaaaccgctgcatattgagaggcttcttgcgtggaagaagaaataaagcgttttaagtttattggattaaatgacaaagcctcgcaggagcacttgctgcaaaatacgctcatactaagcggattttacagcagtgttcctgcgaggctcctgtttgttgcagtgtccagagatttttgctattttttaaaatcccaaatagatgcctgtccgcaccgcatatctgccactaaacgaatactgaatatttaccaatttcattacctgctgcattaacattcatggattgaaccataacaagacctaatgataaaattactgaaaatatcctcttgcacatttttttactcatataactgcctcctttggtctattttttgcctatcccacacaaaacaaaactccttaattaaaaaacctttttttacttctacatatcccatcacctcatcattcaaataaagtatccatctttcatcctgtttcttaattatcaactcctgtaattgacacatctcatatgcatattcatgtttttggacaacctcaaataaaaagctctcattgatttcctttcgtgtataatatgtagaaatatatgcctcatcattctcttcacttcccaattcaacacaatccctattatcacttcctaaaatgaaataatacactaatttatccattgtagaatttactttcatcgctgaacccatcatcagacaaccaatcaaaaaaataattgtccaaaacaaatatattccccaataagcagctttgcttttgacaatattcttatcacgatgtctcccaaagcacataagatgtgttaattgtcttggatagaaaataatcaaaaaagctgaaacaactatataacatattttcattttattatctctctcttaatcaaaattcctaaattggatgtttcctgaaaaacactttattcagaacgatttattgtatcatttgtaaactcaacaataatgttcttattggtgctcagtgtgattcggtggttgttattcatggtaaaagactccaatctataggttttgttacgtctattttaccatatattttcttcacctggtgggtgaataatgatatgaacaacaaagtatcgcaaaagcttgaaattataggatttaaggagtctgtgaagaaatatactaccatttatttctttatttattttctctattacatttatgttctaccggtcttttcggttgatgaaatatccccaaacaaaacggaggatcaccactggctctcttaatctcatttcttatcaccctctccacaaccttcaatacctttttgttaattttcttcatttctctttacctcctgttttaatattttagctatcagcaacagaaccgcacataatataacagcaactgccatatggcaaacatacatcatatcggctccgagcaaagtaaaagtgtaaataacacacacttcaactgcacacaaaattcttgccgccctctttgattctgacagttctaccgcatccatatgtatgttgggatgattaacagtccctataacttcaactatgcaaattgcaactaataataatccaaaaaccagctgcggatagtcaaccagaaccatacataaacctaagacaagcatataagtaaccactgtacccaaataacattgaaaaaaggtattcatatgatatccgcctgttctttttcttaatgacaaaaagaataacaaaaagaatgctgttggaactaatttctcaatcagtacacttattagcaaaatagttccaatggttataaatttttccattaacgaaacaagcgtatagacataatattcttccgcttccttgtcaatcattttttcctcagccatttggtcaaccaaccccattgccatcttctcaatcatatcaacgcctccttctactgtaagtataacaatacacaatttcttaacaaggtctattgcagaaagtgtacttattttgcagaaaacgacaaaaaagtgatttgttctcagaaatcacttttcactagaggaatcataatggaaaaataaaactctcgttcatcgttttgaatcacataagagcccccgtacttccttattgtttcagctatattttttattcctattccatgttcatctgtatccagaatctttgtagtctgtatctctccattttcataaataacagcattctcataagtatttttcaccgatataatcgcattattgtcctctataacaattttcaattttattattttatcccctctgcacttttcacatgcttcaatcgcattgtttaataaattggacataataaccacaacatcctcatcgctaatattcaaagatgataaatcattaattttaaatacaaaaacaatacctttatcccttatttcctgatatttagtattcaataccgcatccacaatcacattatttgtacaaataaaatccaattctttactaatttgaccactgattttatttacaaagctttccaatgaatcatatttcttcttttttatcaaagaatcaatgcacataatctgatttttatattcatgtgtcattttcttttgtttatcaaaattttcagaaatagaacgatacatacctatttggtttttaacctgtatcctataaatacgttcctcctgcaatttattttctcgttttaaaatatcatatattaaataaaatacaactatgttcattcccgccaatccacacgctataacaaaaaataaattctcctgggctttattttttatatcttcagacatttttatcatagctgtaataacacatattgtgaaaatagggaaaaaaataaaccgaagccattctgtatctgccagcatagccaaagattttttctccatatgatttctaataattaatacagcaaaaagtaacaatgcctttcctaaaacaacgaccaatgaaccctgtataacatgtgattcccatacttcttccatgttatgaaaaatataaatattcataagtaacgcgaaataatccatcacgagcaaaagactctcaaataatgctgataaaatcatcgccttaccaaaactcagtttaagataaagcaacataaagaatgttatgagaataattgaaaatacctgctttacaataaaatagtctcgaaaaatcattgcaataaaatagcaaagcactgtcaatccgataactatactataatttttccaacaattattttcctctctttttattccaaatgcttcaaaaaaaattttgcagcataatatttccaacatcataatcataagactctgaatgtaaacaaacatttatacttcacctctataagcgataaacttttcttctacatatttatatctcgctctagctatatctaatagaattccattattcagcaatactctgtatctgcttatatttttaatgaatttcatattaaccagaaagctctgatgtatccgcagaaaatcatttccggcaaacttatcatctatttcatttagcgtcccttgtaatgtatatttttgcagacaatcctccattacatgaaactccaatttatgtaatttactctcaatatacaatatgcgattcaatgaaactttccttgtaccttcgcagaaatcaaattcagcccaagtaatcttataatccattttttcatgaattgcatccatgcactcataaacactggcaaacagatttttattgtcctttaaaatatatcttactgcatctaccttatatccttctatcgtatagtttacaaaggctgtaacaaaaacaataaacatatccttgctgttttcccggatcttttttgctgtcataattccatccagttcatccatgttgatatccagaaaaacaatcttatattttaccatttcaattcccagttcaacaaattcttttcctgaactaaaagtatcaatttcaagcattattcctctgtcagtcatataacgtataagtatttcctttaggtcatctctaaaaatcttttcatcatcgcatatagcaattctaaacatagcttattttccctcgttcaattagaataatataaaaccattttacagtcatatattactatttctcacccgaacaatcaaataaaaggcagaaatcgacctatatttgtagaaaatgaccaaaatcaacattttgaacagcttaatctttcttctattaccaaatttgcattaacatatgccggcattactactgtctccgaacttaaagaatataattatatctctttagcaaatgttcttcctctttctttccttatacgccggatattcttaccaataaatatctcatcttgctttattttctgttccatcccttttcaccatgcctatgaacccattttggttctttttgcattattttatgcaatatgcatgatgaaaagggacttgttctagtccatcttgtttcttccctataatattttaaaaaagagattcgaaaaaggggctgtcatgctaaatcgttaaagcgacagtccctttaaataacaaatgttataacagtaaacacctattatcattaacactttctgttttggtcttttgacatattcctgtgcctattaaattacatcactgttgcaagaataccccatagaaaaaatgcataattttctttgatagtctgttatatcaaacatttacttttttccaatattttcaatatagacattttactgctgtgaaagtttatcttcaagcattgatttagacaccgaaaactcgaatgtatccatattactatatgttgttattttctctggattatcattctcaacaataaattcaggtctaatatagctatctttattcaaagtgtaccgtccaaagactgaacagttaattcgataactgtcacccagaatactgccttcatttgttttcagaaatagaataacagtatctccaacatttgaatgttccgcacccataaaagtatggttaattagcaaattttccatttcttcttctgtgtattgtgacaaatcggcatgtgcttcaatttgttccttttcatcgctcagccgagtatatcctccatcctcatacacagtgatggtttcctgcacctcgcctttatatgctctctccacatcaacggtaagcacagaataagaacatccatcaatatacacatattctatttctataatatttccttttacaatgacatctgatgagtcactatcaataaattcatcaatattatagtaaagattttttaacgcagcttcactatttacatctgtaaaaatttcataactagaaatatcactataaaatagggaatttttatttgaatattcattattattttctgccaaagtggtttcactttcaacaattgcatctttagtattgcttaaatcctgaacacttgcaccttctatccttccgcaaccaaccattgacaataatgccatacaccctaatattctaataccaatttttttcattttactttctcctacttatataaataatttattccacctaaatcattagtttgtgctctcgaggtactacttgaattataagcaatatctgccctcatcaaaacattactaaagtctgaatgtgccaaccccataacatgccccatttcatgagctataacagccaatcttttattttcacttaaatccgaaaaatccgcatctaattgtatttttccccaagcccaattgctactgaatggatcaacctctgtacttccattatacatagttgttaacccccaccattcattaacagtacttacttgatatatatccattctactacttgattgtgttgtggtttttgtataagaaataggggttgttactcccatgctactagttgtatttacccattcgctcattgccgtattaatataagatgcatagccgcttgcacttgatgtaataaagtaatgttgtgtatcttttccataatttcccacaccatatgtcaatttgtgctgattatatgtattatacgcatacacagttgacacactacacatgaacataaaaaagctaaaacataatgcaactataaatttttttgttctcataaaactttctccgcttaattttcttaatacatacaattataaagcaacaaaatactactaaaattttttatctcacctccgtattttttgacaactagccatgagcaaaactccacacattcagtatttatgcgggtttgcgaggcatggcaacctcttttatcactccaaatttatagtaacaatcaactccaaatggtataattaagttgtcaaaatcaattcaccgaaaggagctgattgttatctatcgtcaagaaattttgaaagacatccgtcttttcacttcacaaccagttgcaaagttttatgattctctttttctgaatcttgatttatcctttgttccggaattccccaaaacaggaagaaaagggttttcaaaccacgctatgatttgttcctttattgtcatgaaatgcgaaggtttctccatgatttccgatcttgtcgattatcttcacaataatcttctgattgcgcatttttgtggctttgatatttctcgtccacttccttcttattggacttttgatcgcttcttgaaaaattttgataacaaagttctctctaaaatcatgaaaactcaggtgctattcctttctaaagaaggtattgtagacacttcttttattggcttagattcaactcctgtctctgcaaatacttcacagaataatccgaaatcttttctctcaaataagtttaagcccggaaatcaaccaagggcggattcagattgtagactcggcgtccacactgcatccaatcaaacgaatgagaaaaaatatgaattttattggggctataaaaaccatgtccttgtagactgtatttcaggtcttcctatttatgaaatgaccacaaccgcggaagttcatgatgctaccgtcgctttagatatccttgctgctacccattcctttcaaccaataacggactgcatattccttgccgacaaaggttacgatgtcaaaaatatctacaatcaggttaaggaactttacaatggagaatgtatcattccattaaacaaacgtaataccaaaaatccgaaacttcttcctcaagggaatcccatttgcgaagcagggcttgccatgtggaaggatggtaagttttccgattgtggtcgtacccgtcaaaagttttgttgtcctctaaaatcaagtaaagataccctttgcccatgccaccacaaaaatttctataatggtaaaaagcatcgtggctgtacgagatatctcaccattcctgatgatttaagactttccattgatagggacagcaaatattttaaaagtaattattcactccgcacagaatgtgaacgctataattcgcgttttaaaaatactggtcaagagcggatgtgggtaagaaataaagcatctgttacaaacttaaacacacttgcccatatcagtttactagcagttgccgttgccgcaatcactagccattctggtcagtcttatcgcaaactaaaaacaataaaacgaattgcttgattaaaaaattctcatagtcttatgatttcgtaagttttggacttacgttagctttgctatgccataaaatcgcaacctcaaactttatgggagctaactgccaagttctacttttggatcaatatgttttgctcatctctatttgacaactataattgacaacaattcaagggtcaattggctttgtaaatggtgcctttttttgtaaaacccaaaacctttatcctctaaaaaagtatcgtgtttaacatgttgcaaatgaacaaatcattatttacttgcgagaatgtcatcctattgatattaaatcagtaactgtatgtgactgttattgttgccgttaccgttgatgcaggatatagtttattgggatcataggttttgcctaaattttcaatttgaagataccaatctcctttgggattttcacacacaaaatcggttacataatatgtccttgactttgtagaaggtgtcaaccttgctactgttccttctggactctcaatataaaggtcaaacggatctgtaccacttgctacatttaagtatactttcacctgagtgattttaggattggttcctaaaacacttcctgaagaaacttttgctatttgagataccccaccatctatcgcatttaactttacagtggtcttcgaaaatgaatttgaagctgctaataccggcattgaaaacattaaacatgccataaaacatactgcaattgatgttaaagctctcttcttaatagtattcataaaaaatcctccttaagtcaaaacataaatattatcaaacagaatgctctcccgcaaaatggatactttttatatcattcgttcaaatgactttctaatcagttgactaccagattttactaataaagcatcaatggatttacttgtaattctatctaaaactcccggcatgataggttttccagcctcccatttagggtctgctacttttacggcatctgtgaatgcctgccaatactgtcgctcatactcctctaatgtataccctgctgctaatctgtcgtttttctcagtttgctgatacaacttttgatatatctctgatctgtttgttgtatcgccgttatgcaccccattttccataaaaaattcttttttagtgctttcaaacatctcatccataatgctttctgaaattgaaacaattctatttttgctagcacaatttttatctgtaacgagtaaccccgccaatcctgtgcgtggattaatccagtctccatctttatcatatcggctcattcgtttcttaatggctgagattgtagtatatccaccgccaccatctctggacatctcactcataacagctcgatattgtttactatttatatctattccagccgctttaagtctttcctttgtttcgttactattgataggcattccagacatttgctgaaatctattgctaaactctcttactataagcataattttctctccttgataaattactctgaaatccattttcttctttaacaaacgattatactcttgtcaaattaaatatcactttcttctttaaatatatcaaataaattgtattgttcaattgttcttgcagaaagtgactcctaattgcagaaaatgacactccaaatataaaattcccttgaatcaaaccaaagttcaattcaaggaatatcttcttatcgtttctttccaaccataacaggcatagattttgctgtcatactctcattcattgcttttatagtgttataggtatcatctcatatattataatgattcagctataatttaatggggctgtaaaataagtccctaattaagaaacgccaactccggcaaatgtcggttttgttgtttctttgtatgaatttttctatttttgaacaggtctgcatctttgggtataaaaaatggtgaatttaataaagctcagctaatcacgcttgagttttattcagctttcgtctgtcgttgcttttttgtacatgggaaatttcatgtgtttttccatgccgtgttcttcgcaataaagataattattgtaagaaccgtatccggcatcagcaacctgatatttcggataatgaccatatgtgcgattgaatttttccatcaatggtacaaagcattggatctatgtcaatacattggacacaaaaagtatataccggatcagaaatatcgatcaattttgcgatttctaatggtaatttcagctgacgcatagtataattaccattagtatagtctgttagtagcataattaattataccaaaaaatcgctcagacctcacggcctgggcgatttttttctaggggagtttttttacagccccattgctgtatcttgacataattccaacagctgctaagccgcttcgtacagcgaattttgtagcaagttctcctgcgaggctcctgttttatgcagtgtccagagatttttgctatttatctcctgttgttgacttccctatcaaaacatgtttcccgcaaaacgcaaacgcatatttatgaatcttttcctccggaattcctcttgcctccaacgttgcagcatacttcttatattcaatctgctccagcccggctttcactgtatcttccagatctttctctgtttccgaatcctgaaccttgaactcaataataaatgcatcatcgcacttatctcttggctccaacatcacatcgtatcttccgaatccactctcccggttcgaagtcacaatataacaatcctccagttctacaatcagccccagaacaaatggtacagacgtcagatttactactattttcaatttttctatcctgcatctcgtttcagaactttttagaaccaatccagaaccacgatactattatagaaccagagtatatttagtctttcaatctgcttaacagcatctgataatgccgctgtccgatatgtcgtccggcacgttgcagaccattcacgcattctctgacttcatccgatgtcagttcgtgttcctcataggctgccataagaatccctatcgtccccatgattctaagtcccatctgagctgatacatttcttccctttgcttcatccatcaataacagatctgcttttaattcatctgacaggacaatcgcttcactctcgccctggtcaagacctgccgctctttttaatatatatacttgctgattccggattattgacaggcttcactacgataaatttcttctgcctgatctcatcggcttccagccgaagcggtgttgtatctgatacaacaatcataccgcagcctccttctttttgagttctctgaaagtattcagttcatcatccagatcatccatcgtcatatcaaaataggaatatcccagcttatcatacagatcaatcaactcggattttctgattcccagaatttcagccgcacgaccatgggatatcgtctgattcagtatatatggatacagcaacagtgcatttcgagtaagctctgtttccggattcatagttaccagatattttgacattcctaccggaactttaatagttacagattctgttgttaccataatatcacgtcctttctgttagaaatctatgttcgtctcttttcctatattattattatatccattatttggattttctacaactgatttttatctgcttttattcaagtaatcttcctcgtcaaaattgtgcgtattggaactattctggacgtgctatgttttacaatgcactacaaaagaatgggttaatttagaactgtacatatcccatttgttgcagtgtccagagatttttgctatttttatcttgttttaattatcaattgcttcgacaacctcctgtatatcatcagcagtgagttttgtcagcttatcatataagtcagcttcaagctcatcatccatatcaccattttgaactttaataatatactttctgacttcaattccaacctttacaaattcataatcaccacaattgtaaatagaatctaacccatatatgatcccacaataataaaacatctgcgcaaaattatcactttccctgcttattcctttaatattatcctgtaaaaatttctttgcctcctgcaattgtaaattaatagcttctttgtccaaagaattattctgcagattttctgcgtattttgatgcaagactatagccttctgtttcagacttaaaagtctgatattctattctctgttgttcagtactaactttcatattattatcttctcttgtatttcccaggaaaagaactccagccataaagtacataattattatgattataagaacaattccaagaaaatacttatttattttcattttcctcaacaatttttccctccgcaatttttaatatcacatcacacacttcctttaaatcttctttatgatgagtggctacaataatcgttgctcctcttgacttctcctctcttattattttatatataagctgcactgcctcttcatccaatgcatttgtcggttcatcaagcaatataatcttttgattttcaaaaattgcctgtgcaatatttaatcgttgtttcattcccaatgaaaattttttcacttttttatcagagtcgggatccagacccaccctttccagagaaaagattatatctttttcatcagctatattttttatctttgcaagcatctgaagatttctctttgcggaacattccggcagcaattccatattttctataacaataccggtctcaggtggaaactcaattttatcatgcagcttttccccatcaatgaaaatacttccactatccagatttatcaaaccacttatagctcttagcagcatagtctttcctgaaccattttgcccatataaaccataaacaaaaccacttttaaacgtatacgatacattatccaataccgtattttcctttatcctctttgttacattttgtaattgtatcatactatatcatctcctcagtaaatgtctgttttcttatattttattattgaaataatatttaaaatcactaataatataatcacatatgtaattgaagcttcgtatctcacatatatgtttttttgatatattatcccactacgcgttccaaatagcatattggggaaaagcataactccaatccggcttaaatcacgatttatcagtacgttatttccaattatcagtgataccacaaaaaaaatatttacaaatatatttgaaatactggcatccataaataattcaagtaaaaattgtaattgtaccaatgtccatactccaacaaaatatgtaactattacctgtattaattttatacttgataaatcattccatgtcccatcacatattaaaaaaataatcgtctgacctattactatacaggctaatttcgctgctgataatatagcattttttaagtataacctctctctgctataagatctgatcagccaaagcttaccatatccggttgtaatttctcttgcattacccgaaaagtaaaaaagtacaaatggtaatggtatatatgcatataaaatttgcactaaattacttgttgggttgtcaaaaataaaaagtgtactggcaaatggtaattgatatacctcatagccactcatttgtattacaactctttgcataataatcatgcatatgatcaatattatgtttaaccacttatttttcatttcttaaaatatccctttttgcaaacgttactattccagctatgtacagaactattgccattactatattttttgcaagaatacccaaacagcttacaaacgatttatttccttccaaaaaattatatgctacagcaacatctaaacccggtatccaaaacttaacgagccaaaatcttatcaaaatgaattgcacaaaattaactccaaaagctcctataagagcaataagttcattttgtaaacaatctctaagtattttataaaaaagacctgttgcgacaaagaaaatccaaataacaacaaattccataagagaatacagcacaaatggatatttcttaattgttgcaccattaaaactatacaccgtaaaaatataatcaactatctgacgaactgccgaaaatattgccgccattacaataattatcctgatctggctattattatatttttcccgcgttttatatctaagtaatatatatgttttttctttatctaatgcatagtatattcccaataagacaggaattgtatctacaaccaatatttctttaattccacagaaattactgcctgaattgtggatattcaggaaaattacatcctccgttatccccatctgccctattgaattaagcataggtacatttgaaaaataacaatctatactacacaatcccacatatattaaagcacatactaaatatttatacttcaacaatttttttctcccatataatagctgttataatcactaaaatgtaaagcactatacaccatatcgccattggaacaacaacattaaaaccatattccataaacggttgaaaaatatgcattgatgaatttttaaacaaaataggtatgaaccaaattgcaaaggtcaacgcatataccatctttctttcgtgtatagatattgccaacgcagctcccatcattcccaaaacaccggcaaatattgccgttataagaatgtagactatattcgttgtcaatggatgtgtatagcttatttcaaaaagaaatgtttctaccatgacagaactgtcatatttcaatggttctgcatcaaacggtgtatttgttcccccattaaatactacttgtgatagtataagatttaatcccagtcctacaaatacaattgtaaatgagacgataaaggctgatttcattttttgtaaaatatatttattttttcccattttacatatcaatatattcttatatcctgtaatataatcaacaatactctcttctcccactattacaagcaaatataatggcaaaaaccacagataaatcatttgaaatatgtgcccttgtgaatagcatgataaaaatgtgacatataacggatagggtttccccatttctccattaattttaataatatcctgataataaatctgtacaatatccaaaattggaattacaagcataaaaattatcattcctatactttttttatcacttataattctgtttaattgctgtctcatatttccctttcctaacagatgccccatatataagcgggcatctgttgttaaatatagtcctacttaatctgtctcttcatcccaatatccactaacagtgtaagtactcgaagaattattgttgttttcagctccaaggcacacatcgcgctgacttgcacttgaaaaagctgaataataatgatcgccagtaccttctttaatatcgtgtgtagccgaaactctatcatggttactattataagcagctaaccagtatgtagttatcgtaccttttccttcttctgaatatgtcatattgactttccacttattttgtgtgttagtagtctgtctgtactcctcatcagaatatgtgtttgcataattagcttttattttaaagctatatggaatattatcatccgatgcaaaagcctgacttgcattcatgcctataagcatcgttgctgctaatgctgccattacaattctttttttcatggccttcctccttgtaatttttacattttttactaccgcattgttaccatagacgtctatgcttatatactaaactatatttctgaattatcggcttaatttattctaaatttttctgaattattatgtgattgcttttcagataacacaagctttgtaattttagaacttcagatttcttcagatttttttagatttaattaagcacattttacatttttatgtgctattatattttatattattatactacttaggagatatttgcgtatgaataaactacttattattgaagatgatgttactattagaaatgcacttagaattttacttgaaaatcaaggttacttcatcgaagaagcgcatgacggtgaagaagggctccaaaaatttgactcaacctttgatctgctgattattgacataatgatgccaaatatttccggcatcgatgtatgccgtaaaatcagggaaaaatcatatgttccgattctctttttgacagccaaatctcttgaaaccgataaaatggaagccctttccgccggaggggacgattatcttgtaaaaccattctcctacgtggagctgatagcgcgtattcaggctcttatcagaagatgtcgcgtctacgacaatgcagatgcatcagacaccaccgcttcatccactattgaacgatgtggcttaaccttagacacaaaatgcaacaatgtcagttacgatggcagacagcttgctctcacggataaagaatatcagattcttctgctgttaatttcacatccgacaaagacattttcaacacaaaatatatttgaaagcgtctggaatgaaccgtatacacagttttccaataacaccattatggttcatattaaaaatctgcgcaataagcttgaagccggctgtggctgtgcccacctgattaaaacagtgtggggaaagggatataaatttgaagaataaatttaacggatataaggaatacataagcagcttattgatttcatttttaatagctttgttgatttcaattactgtatttacagctatatacctttgcggggaaaaaataataaatgaatatgtaagctccgacagctatatttacaatacacaagctgcgtatattaccagctttcaaaaatatgtgtctgacaataaggtttcgtcaaacgactttaaaagcattgaagcatggattcaaagagaaaagcccgaattttttctcatatccattgacaatgaaacatattacgcttcaacagaatatttaagtctcaaaaagccccaaaatctattattatataatcagaaaatatctgtttatcttacagcgttaaactttagtgacaggacagctaaaatttttatatataataactatcaggacaaatatctcaaaactttgcttatttgtgatgctctcttcactttaattacagcaatagtgattttgtttttcattttcaggcatattctcacacaaatatatggcactttaaacgttgtcgagcagtctgaaaccgaattgatcaatgaaaaaaatatgctgatacgaagcatggcacacgatatccgcactcctctcgcagggctgcagtcatacgctgaaattatcaaaatggaaaataaaaagggtgcgattcccactgaacacatagatgtgattttcaataaaatatgcgaaataaaaggccttaccgaccagctttttgactattcacttgcctgcaacgaagaagctcttgagcttgacgctccatgcaatatggaaagtgcaataggtgactatctttctgagatggcttttatcctccgtgaaaacagtttttcacttgatatagaaaagctcatatggaaggattttaaaatcactgtaaactcaaactttctcggacggatttttaacaatataacaaacaatatatgcaaatatgcagataacaaagcgcctgtctgcataagctctatctaccggagtaaagatgcaggtatcgagataacaaaccatatcgcagataaaagctctctgtttaataccaccggcatgggtatcagaaatattacccttatgatgaagcagatgaatgggcgggctattgtttcacataataataccgagtttcgcattactctttggttttcacgcgcataaacaaatcatatttttgcaatataaaaggtcaaacccgatagttaaaaatgacggagactcgcaggagcgcatgctgcaaaatacgctcatactacgcggccaagaggctgtaagaattatgcttaaaggttttctatgcttgacgcaaccggcttttacgcgccgtccatggcgcggtaacgccttgccccgacgtcgtgtcggagcattgctgtgttttgacataattctaacagactctaggccgcttcgtacagcggattttgcagcatgcgctcctgcgagtctcctgtttgttgcattatccttgactaaatcctcgactaaactcttgactatcctcgactaaaaaatatattgttttagtccttagtcaagagataccattctgaatttattgcaataccacgcacatcaataattccatttttcttcattttttgcaaaagatttgataatttccttgatttttgctgatcagtcaatacatccggtaaaacatctttaagtaccgccaataggtctgatttcttggctggtccgagttttagtgtagacaatataaaatgcatacacacttcctcatctagtcctttttgtctgacataatttgccttgtctccaacaacctttgctactttatatgaaacaaaaatatttggataccttccctcgactaaattccttgacttaagttgactaaaatcttctttagaaatagtcttctttttctgtacctgatctaaaagaaatacagttctcaaatccaaatcgtcgtttgcatgcaacaatcttgtataattaggatctaatacttttccatacaccgttacaacaactctgttaggggtatctaaatcaaatgttggcaatggaaagcatttacctttctgtatctcatatatcatcggaattcccattgaatttgtgtctatcatatacatattcaccatagcattacacaaaaatgcatttctataatatggaggtttatatcccggctccaatgcctgttctactgtctcaggaataaatgccccttcattaatgaaaacaagatgatcctcatactcttcaagatttattttcccacgcaatctgtaatcagaatgagctatacaattgttgataatttcctttactaaattaggattatattgatccacttcttctggaaacaatgttgtctggtctgcaatatatctatatttttcatttctgatcttaccatatactttatcaaccgccagcagtaaaggcatatcaaaatgttcatatgcttttactgatttatcagcattatataatgtccatgtaattctcggaacaaaaccatcaaagtaaaagcttgattcttttttaccaagtaacattaatgctgttcttgtaatctgtcctttaaatgtaagtccagctttattgagtacttctatatcagataacctctcaattatatctgatgcgcctgttctattttcttctcgtcttatgaacatcttcctagcatatgcaattgcctcagaatccaaatcatcaatagttgcttctggcactatttccttagaccagtcccttccaacctgacttcgtatcaaatcaatcttattcataggtagtggaactaaagactcatcttctcttgcataagatgctccatgccatgtagtaactatacctggaattgccggtggaatctgaaatgcaataactctcttcccttccatttcaatgcaatatatatcataaaaagtgagtttttcattcgttccgttggttatttcttttttcagggattgaagatttccatcttttctataattagtccccttaatctgtttatcatttgttattccaaaaatcaaccaagcttcgttaagcccccttatatttgcctcattccccaaagcagaaaaatatcttccaatatcattaaatgaataattgctcgttgcctccttaaactctacaacttcactttcaaactcttcaatcattttatatattttctttttcaattcactttctgtatatatcaatacccatacctcctattttaaccctaagttttaatttaatcatccaatccgtcatataaagatttaacttttaacacataatcattattattttctgctattacgggctcgatttcttttaattcaatatatctacttttctctaaatttatgcttttcttctcttttatgcctttatgaacatattatagctaaaattgcaataatcactgaaattactgcaatgacttgattactcttcgtgtaatttatttctgccattttttccatataatcgtatttctcttcatatattttcttgtaatcttctatcttaatatatttgtaatcttttagtctgcacttattattccccttatataaaatccaatttttatcaaaatctttcatcaattcttgttcgctgcctcttaatggctgacattctgaaaaacttctaacttgcttaaataatttgattatttctctattaaaatatattttcttacgtccagatacatattttgaatattctttttcaaagaatgtaagttctgattcccccattattctcaaatagaatatgtttccatatttcattacatattcgcttatatcaaacttaggaacctcattatctcctgataaaagtacatattttgtgctatcataatttctattaagaataatattctggtctttattgtaataagaaatacataaattacccccaagatatattttatcaatatctatagattcttttcttatttgataaacaatactaagtaatttcctttttgtgcctgtttctgaaaaaaataatgatgtaacaaaatgctggcatatatactcaaaataattttgattcatttcataaattatctccagtttatgacaaccatcaatattaaaactttcaaaataatcgtcatctgttatttgtggcaaataatctattatgaattgattacgattttcttcattaagcataatactaaatgaaatatcatattctataaaggcatagatatcattcatttgcgttacagttatatctatgcaatttatatatttagagtctataaattgtacttccgcaagtctgcccaaaaagcaatgttccttttgcatatgtacatagtcatatttatgcagaattgttggtttcctatataaaacattgaataccttatacttttggtgtgataatttataaagactattaactaactttgtcatcccatcatttgataaaatgtcataaattttaacctttggtacataataatttaaaaaataatctgtatgctgtttatttacactttctttttcaatttttctgcaaaaatcccttgtttgcctatcaacatattcatggtattctatctgatcaaaattttgcaaataaaatgcaatttcagatttaatttttctatgtttcatttatacaatcattctccattttatctacatctcatattttactaaagccaaataaaatactagagttccttaacaatccgcataaactcttcatatgagtatgcaccattatatccaggattctttgtttcaaacaccatataatacttgtacattcttccagccatttcagcccattttgccccagtttctgctttttctttggactctgaattttcaagttggtctccttttgtttcaatcagaagcagcttgccactttctgtttttaccattaaatctggatatgcgtttattgcaccattgattgaaaatccttttcttgctatatttctatgccaccatcttacattgttcaaagaagataattccataacaacttttcgttcatattctgtatcaaagttttcttcttcgctatacaaagattttggaatcgatgcaatagtatttgtcggtgatatctctctcggtaatttatatgatggcagacaagagattttatcttgttcaacccactcataaaacattttctttgcatattcatttaaaagagaattaacttttttattaattttcaaaacatagatgcctggggtctgttccatatctgttaattgatcctcagtcaggttctgaataattctgtctacatatatacccaaatctctatcatttaccgcattattctttgataatttctttattatcatatccttgcacaaacgtatttttctgtctgatggctgttcatcaaaccactttttcacattttgattgtcgaatccctgcaatttccatgctttaggcattgcatcagaatcatcaatatctatacgggctatttcagaatccacactatcaaaatctatagctgtatctttatccaataaagaaaatcctgcatataaattttccttggatagaggctgttgcacatgttcagaaaacagagaacgtcctgtctcaatcataaattgtggtatttccatactgctagcttcatctgcaaataattggttcaatttataatgcttaattttatcccctacttccggtggtacaggtacataatttccttctgtctcctgaaattcctgccgatacaactcattctgtgattttgcatgttcaagcatatcgttaatcgctttagatgatactgaactatcttctgttcctgtttcagcagattcattctccaatgtttccaactgtatcttcattaattctacatttaatccatcaagttcgtctgtatccttatcattattaccaacttgaatattgtcaagtggcagctctgtctgaccattagcttcttgttttgtctgccgttcatcaactacatcttcacagtcatctactctataatctttactggtaaatcctgctgcattaagtccaactactaccttatcaagagttgcataaaatgcatttgatgatgtaattacatatgaaagatttaagacttcgctttcattctttttggtattaggtaatcttaaaattctacctaatatctgctccacatctatactcgatgttctatttgcaactgtagctagtatatatgcaaaaggacaatcccacccctctttcaatgcattaattgttataatatatctaatattgcaatccgaactactcaaatctatattctttagttcatccttatctgctgtttttattgcaatttcagactctggtattcccatctccattaaagtatgcttaatcttctcatatgttgtactgtcagcattgtttttaggctgtgcctgaaacaatacaataggacgaatatatttaccgccgtttttttgtccctgaactgcctccaattccagctttcttcttaatgatacagcagatataaaaacatcttcctgtgattttctgttgtatacaattacaggtaactttaccatgttttccgcttttaactgtctggcatctacaaatgaaattatattacttcccttcttcggtgttgccgttagatcaagtacaaatgacggattaaaattctgtaacatttccttactaagtttgcttgttgcatggtggctctcgtcaacaataacaacaggattcagtttgcgaataacctgaattaaagcagtttcatctatatcttctaataaagtactgctatcttgtttaaaccttacaaatggtaataaactaccattttcctgatatgcttttcttccgtcttttttacttgtcctaaatgaatcgtaacttaatacaaaaatagacaaattgtcacttactgatgttggattaaaattctgtccatttaacaattgctgcttagaataaatctcgaccttattaccaaaatcaacatctattttcttcctataatcatgattcttatctgttaatgtcttatatgtctgtgacaagatagcatctgaaggtacaagccatactactgccttaggatgtatatgtggcatagaagcaaatatcggtttgagtgaatttgctgccagaaaagtctttcctcctcccgttggaactttaaagcaaacctgaggaacacctgctagttcaggattatatggtggcatgccgtctattccaacattaattcctttttcattccacaaagcattataggctttacttatattctgcttttctatcagcaattctaaaaatctgtctaaatcctttattacctgtaactgatatttttttaattccatatctcattcctttctagatatgttcaatatctcttggtattttcttaaatgtgatattccatttttgtaaatcactatctgacaatgcacaggaatccgcatatataacatatgcttgttctttcttatgtacacttgtcaaaaattcataatcaagtattgttaccctatctttttcataataaaaataataggctgtatcattatatgaaccaagaaaatacttttcctgtatatcttctttatactcaatgccatttgtctctgtataccagacatactttctgacttcagttatatctacctcatcatttatcgttccatcttgcataaataatggatttcctaattcatagtatgaaaagttaccgcctgttccctctactgcattctttccttcaccataaccatcaatcactcgttttacacgttcggctgttattgtgtccgcataatcctctacctctatcataatataagataatttcaaatctgattgcatcacagcatgtgcagtagttgccgaaccagcaaatgagtcaagtacaatatctccatcatcgcaaatgattctcaaaatctgattaataagacgtactggcttaggtgtagcaaaaaaatccgttgaagcatctaatattttttttaattgttgttttgcctcttgtgtatgtccaacatcaacatgtttccatatagtctgcggtattataccagacttcacatctgctaaaaatttttttcttcttggttttgaatttccatttgccccaaaccacacttcattattttttatcaatgccatcatttcttctttaggatgtctccagcttgttccaggttgtggcttgtacaatttaccttgcggagtaggtacctcataaacactgttatctctatgttccattcttagcaaatccgttgaaatccatggtccccttggatcattatctggatttttatatcgttctaactgtttttcacttttaggcaatgcttttattttcagtttttcaatttccgcagcatatactaaaatatactcatgttctgatgaaaaatactttgcgtcatttttagtcgcaaatgtcctctgccacaccaattgtgccacaaaatttctagcgccaaaaatttcatcgcatacacattttaaaaatgcctgttcattatcatcaatgctgataaaaatagccccatcatctgccaacaatttttgtaacaacacaagtcttggatacatcatacatagccatttatcatgccttgacaaatcttcgccttctttacccactacttctccgagccatttccttatcttgggatcatttacgttatcgttatatatccatccttcgtttccggtattgtatggtggatctatgtatatacatttgatttttccttcatattgtggaagaagcgacttcaaagcttcaagattgtcaccatgaattatcatgttattgctgtgaatatcctctttgtgcataccactctcatcaaaactatactttctttcaagtactttatacggaacatctttatgatgattaattactttgtcttttcctatccagtctaatgtaggcatatattgctccttctctgtaactactgtaatgtttctattgtttcaattatgttttctgccttatccgtcaaaacatatttgcctcttgttttttgctctatataatcttgcttttgcaaaatactaaacatactgttaatcttcatcttgctacattttaaagttgtcgctatctcctgctgtgttaatggaatgactttttcatccagaatcactacttcattatcatgcataaactttaaaagatcataataatcattcagaaataatttgatacccatgttttctccctacatttcaaatcataatctacttgtaaattatatcacatttttgtgatgttataaatatcatttttttgttatctatttatctttaacagctaaaagcagaggatttatctctcatctttatgatttatcaccaacaaaaaattactataacatataaaaaacaatccgctacaccaaaatctggcatagcggattgatttatatacatctatctatttttatttatcaagcaaatctgtgtagaaatctgcgtaatgtgtctcgcctgacttgatgtagtcaatggctgctgatggatgctgatttaagcgtcctgtgagcaggtatggaatatcgtagccccatacagcaccgctctccttaagcggaagcatatgctcttcaatgaatttaagtacagggaatacattgtattttggattttttaggaagctgagtaaaagctccatcgcacagtttcctgcgcctcgtcccatgcccatcattgttgcatccaacaggctgactccctgggctgctgcctctatggtgtttgcaaatgcaagctgctgattattgtgcgcatgcattcctacgaactttccgtttgcctcagcaatttctgtgtatttctcggcaatgcggcgaatctgctcagggtagagagctccgtagctgtctacgatgtatatgccgtctgcagagctcttggcaaccatgtcaagtgcctgatcaaggtctgattcctgtgtatttgagatggccatgatgttgcaggttacctcgtagcccttggacttggcatcctcaatcatctcgattgctgatggcatctgatgtacatatgtagccacacgcaccatgtcaatcacactgtcctcgcgagggagaatatccttcttgtagtcacatctgccgacatccgccatgacagaaatcttcatatcagagttgttgtctccgactatctcacggatagctgcctcatcacagaacttccatttgccgaatttatttacatcaaaaagctccttagatgctttataaccaaactccatatagtcgatgcctgcctttacgtttgcacgataaagagcattgataaaatcatctgtaaacataaagttgtttaccagtcctccatccctaatggtagcgtcaagcacgcggatatcagggcgtgctgtcattaaatcacctttctgagccatttttgtttcctccaagtataaatattattgtaacaaatataaatattactgtagcttgatgttacattttaaagttttaatgcttcaacgctttaaagcatataagtataataacacaattatttaaaattgcaagtaaaactttacttttttttatcagactaatataatgaatgaggttgtaatacaatatcaaagcctgctaataaaaagtcaatagtaaaatgaattatttttatgattgtgattttgggcacaagttttgaaccgccatatttgccggtttgaagaaaaatgagtttagacttggttattgctctaaattacggatgcattccttgaccttgccgtaatagatacgcaggaacttattagccccagcagtcatgtaaacatagtaaggctttccttctgcacgcttcttgacaagaaattgatataccttatcatcttcaggagctgtttgaagcagtgtagacatgatttgaaacaaagtctttcttagacggttggaaccgcatttagatgctttattactctttgaattgtgggtgcctgactgatccacacctgggtctactccggcaaaagcagtcaatgcttcacgatgtgagaaattggaaatatcacctatttctgctataagctggggaccaaaagtttttcccacgccatacatgcccattaccgttgcgtattcgggcagagtagaagcaagttcattcatctttgaacgtagttcttctacatgggaagaagcaagattaagctgctgaatgctttgctgaataagcagtttataagacgcttcttttggaaagacagcaataaggtctttggatgcaagaaatagttccgctggttttgctggttggaaattatagtgatgctttttacagaatgcttgatagcgttccgtgaatgtttttaatccaattttgcggacacaatccacatgccagaatgagtaagcataatccacccatttttcactgccatcatcgcggacagggctgtcaaagagtttattgacaccaggataggtattatccaatagtgcaatcaggttagccttagcggcaaccttctgcttcatgaagaagctgaattgtgagtttaaagtttttaattgagtacgtgtattatccatacttgaatactgtcgcagttctatccagttgtcaagagtatagcgtgcaatcttcttcgcatcagcagggtcggatttgactttgcggatggagttgttgccaaagttcttgatcagatgtggattgacagcactgacaaacaaaccggcttcagaaagagtttttaccactggttcatggtaacgcccggtgcattccaaaacaacacgggtttcaccttccagactgccaatatatttggcaagctcatccagttcactggatgtgtgattaacattaaaaggcttacgaataataacacctgctggttgcaggacggcgacggtgctcttgccttttgatacatcaatacctactgcgttgtacattctcgtacctccgaaagtgaatttgtatggtgtccagctatttctcattgcttattcaatctcctggggtatcaaacggacgtgcacagggcagtccaacctgcataaatcgaacggctgcaaatgataggctggctgactggctttcatacggacgtctattgagtccaaggagaatactgtcagaccgatacctcatcattgtacagctttagcaataagagggatagaacccaactggctgttggggtatctaaaccctacacttatatattaggaggaggactatatgatttcttatttgacttcggcagatatgtcgataatagctttcatcggagtgatttttgcattcgcactcacatgtattgctattgcaaaattaaataaatttttaccaaaggatctcggcagacagtttgctgtggacggaaagctttcagccgggaagccgagaggagccggtattatctttatattcacatttgtgatatcggcagttcttttctcacaaatcaatgcggagattgccatttatcttgtgcttatagttattgagatgctcacaggctactttgacgatgcggctgaaaagccatggggagagtatttaaagggcgcacttgattttgcggttgccattgttgtggcagttgtgtatctgcatttcaactcaagcacaatcacctttgccatatttggcggctctgtaaatattccaccagttgtgtttggaatactcacagtcattttagtctgggtatcaatcaatgtcacaaactgttcagacggtgttgatggtctttccggaacacttaccatcattaccataatgaccttcttcgtgcttgattcagtgctcaaaatagctgacagcttcaactattgtattttattatttgcggtatgtctgctcggatatctgtggtacaatgccacaccaagcaagcttttgatgggtgatgccggctcaagagccatgggtatattcatagctatttgtgctcttaaatcacaaagcccattcatctacatactggcaggtctcgtgcttatcatcgacggtggacttggactcgtaaaggtttctcttcttagatttttgaagatacatattttaaagaataccacaactcctatccatgaccacgtcagaaagaagctcggctggtcaaatgcacaggtcgttttcagatttgcaattatccagattgttgtgtcactcgcgacggtttatctggcgatgatttaacagttttaaaaccatataaagcaaaagccggagtctgacaatttgtcggctccggcttttacttctttcggctcgtaactgtgaatgtaccaaacagttacatacttatataatttactgtgtggactcctttaacactacctcatacggcagaagtgtcctgttctcagtctcttcaccctctatctgtctgagcagattcttacaggctcttgctccaagctcctttgaatcaaatgaaagcgatgtaatggacggcacattattttccagcactgagctgttgtaaaatgaagccaccttcacctgctgcggcacctttatatgcctttcgcggagccgtctcatggcctgcgcacaaactgcatcatccatacacagcagacagtcgcagcctctgtcaattgcatcatctacagccttttcgacatatgctttgccttcaaggtttaaaaatacaagattgtcatttattttctttccaaactgctcatgggcatccactacgcctgcgtatctggtctgatttacaacaatatcctcgcttcctccgagaagcgccatatttttcatgccacgcatgagcataattgatgtcagctccctgcaggcacttctatggtcatggtcaatctgctttacatccttatatttgcatgagccagctgtaacaaacggtatcctgcgctcctgcaagaatgtcacctgtggatcatctaccatcgtgcgaagcagcaccactccatccaccttatgattctgtatgatacgcctaagccccgccatatcattgcctgagcctatacaaagcaaaaggtcgtattccatcatacctgctatctcctgaatccccattatagcttcctggaaaaaaggcagatcgacaagtgcataatcccccggcatcaccacacatatattaaatgtctttgactgtgcaagccccctggctattacattaggtttataatcatgctcctgtatatattcaagcactctttttcttgttgcagcgcctatcctgccctttcccgatatagccctgcttactgttgtctttgaaacgccaagtgcctctgctacatctgatatagtgatattgttactcattctgccgcctctttcatctaaatgtgattaatcactgaacaacttttatttgttgcgcaactctattgtttttcattataacctatcttcatacacttgtcatcctagacatgcaatttttgcgcaactgactcattcttccacgcatattcgctcaacattttgctttctgatggtttaatgtttacaccattcatttactaacgtatatttatagtataactattggaggtacatataaatgaattttaacgaaatattatatggtgtggcatattacgacgaatatatgccttacgaccgcatagaaacagattttaagatgatacgcgatgccggcatgaatgttatcaggattgccgaatccacctggagcacatgggagcctaaggagggagtatttgattttacacacctgcaccgcatgcttgactgcgcagcaaaatataagctgaaggtcattgtcggaacacctacatatgcaattccatcatggcttgcaaaaaaatatcccgatattctcgctgtaacacataacggcaaagagctctacggccaccgccagaacatggatatcacaaaccctgactatctgcaccatgcacagattatcattgaaaagctcatggagcaggtaaaggactacgactgcgtgatcggcttccagctcgacaatgagacaaagccctatgacacctgttccaaatacgctcaggctaaattcgtagaatatctgaaaaatgaatttcctgacattgacgagtttaacagggagtttggacttgattactggagcaaccgtgtggatgactgggatgcctttcctgatatccgcggcactataaatatgagtcttgatgctgaatacaaaaaattccagagaaagctcgtgacagacttttttgcatggcaggccgatatcgtcaaaaaatacaagagagatgaccagttcatcactcacaatttcgactttgaatggcacgattactcttacggcatgcagccggaggtcaatcaatacgaggctgccaagtgtatggatatcgcaggctgcgatatatatcacccttcccagagcagtctgagcggccgcgagattaccgcctgcggcaatattgcaagaggcataaaaggtaataactatctggtgcttgagactgaggcagccggaaatcacccatggcttccttatccgggacaactgcgcctgcaggccataagtcacatcgcaaacggtgcatgcatggttgaatactggcactggcattctatccacaatgccatagaaagctactggaagggcgtgctctcccacgaccttagaccgaaccggctttataaggagtgcagtgttatcggaaacgaactaaaaaaatacggacacaggctggtaaatttgaaaaagacaaacaggtttgcggttattgctgacaacgcctctcttacagggcttaatgaatttaagctgaacaacgaaagtgactccaattacaataccgttttcagatggctttgcgatgccctgtatctgatgaacattgagtacgacgtgattcctgccgacccggcactttttgcttcatatgaaaatatacttgtgcctgcactctatagcgcaacagatgatgtgctcaatgccttaaatgaatttgttgcaaacggcggcaatatggtggtgacctttaaatctgctttttcggatgaacaccttaaaatacgccatgacgtacagccttatattataaacaaggctctcggcatacagtacgatgagttcaccctgcctgacgatgtcaccgtaagttgtggcggcaaatcgtcaaaagcgcgtgactggatggagatggtcgactgtaccactgccacacctgttgctatgtatgagcacaagcactggggagtacacgcagctatcacagaaaactcttatggcaaaggacgcgccatgtatcttgccacactttttggtgaggacactctgatagaagccctaaagcttttcttcggcgaggcaaaaaatgaatttgatgcttcttatcccgttgtcataaagcgcggcaccaatatgcagggagaaaaaatcatttatctgcttaactactcggatgatgagcagactgttacctgccatgcagacggtctcaagaagctttgcgatgacagtacagtatcagcaggcgattgtatagctcttgcaccatgggattttagcattctttatgcagattagcccacaggttatatcctatgctttttgctgcagataaatatttcacaaaaagcttactatctaaggtcttaattattaattttttcataaaatttattaagtcttttgttttggtgttgtttgaattatttttcagtgttataatttcaagcggattaaaaaggtggttttatgaagaaaatacagaataagcttatagagcttttcaaccgctacaagcatgtgtggattttatcatactttatcatatatctgacctggttcggatatttagaacgcactgttaccacacattatcacttgattcatcttccaatagatgattatataccattttgtgaatactttgttattccttatatcatgtggtttggctatgtggcctttggaattgctttcacggcattacatgacaaaaaagaattttacagactgtgtgcgtttttatacaccggtatgaccgtatttttggttatatcaacgctctacccaaatggtcacaatttaagaccttattatttcacgcaccacaatatgtttacagcgctttgcgagtggctttactccactgacacaccgacgaacctgttcccgagcattcacgtatacaattcgcttggcattcattttgcggtgatgcacagcagctatttcaaggataaaaagcacgttcagcacgcatccttagtgctttgtgttctgattatactgtctaccatgtttatcaaacagcactcagtatttgacgtttctacagcctttatgcttgctttcgttatgtacaatgtggtctacatcaaaaactggatgcatctgccacagaaaagcggaagcttccaggatgcagcaaacagcaaggttcgtgtttgatttaatgattgcagctttcaacttaaaaagacatcagccggaatttacaccggttgatgtctttttatatttcactcataaaaatgcatgacactcaaagtctgcatatctgtcctgttatcttactctctccctgctgtagtcgagcaccttgtccacagttgattttatttctactgaatttttcctctgagtcgaaatttctgcgtatgcatcctctatctgcagcttattgcgctcctcaaacttgataatctcctcctgtgtattgcggattgacacaatctgctgtctgcacgcttctatcatgtcaactgaaatctcgtcacactgtgaaaacacatgattgagctctactccctgcttcatgagctttgtcgtggcaacattgttgtcctttagaagccctacaaggtggctcacctgctctttaagtgcactaatctcagcttttgcctctgaaagttcctgtttcacagcatcgattgcactgtcatatgaaacagatgcctcccttatactctcagcagcctctacgaacagctttccctgctctccaagcatgcccgcctctatagcagcattgagtgagagaacactcatctgcttattctgctccttcatctgcgcagctatatccgcacagctatccacatgctcctcaagcctgtccgatgtctctgacaagctcttagccggagctgtaaaatgtttattgttttcgacaagcgcacatgtatcctcatgctgtgtggcaattgcctttgccgcactctcaagacttgtaagattatccgcagccgcctttacacactctgtaaagctgtcgtttaaggctgatatggcatccatgctgtcctttgaaaattccaccacattatttgcattatcattcagctgcttaagggatgactcctcaagctgccttgatttctccagctcatcaaaatcagcctctataagctttgactttgcatttacattctcgaaaaatcccctgtcattatccaattgttccttcatatacgctaattcctcagcggatatttttgctctgttcccaaacactgatctattctgctcctcctttaccggttacctttttagaatataatatcacttataatactgtatttcaaactgcagtgactcattttccctgaatacgtttatctttggtgaatatactacggacagcactatattattgaaccttcctctttgtgcagcttcaagcgcgtccgaaccaaacctttgcctgatatagtcaaaaaagctttctatatcaccaaaataaattgcattaattggcgtgccatatgaggatatcaaagaaagtctaagcacattgttgtttttaccaactacccacatgcggcttacacgtagatttttgtctgcaaaaacaggctttggattgtcctttccaaacggtgccagtactgaaaactcagacaccagtctcattgatacataatccaccggcatcggcacatctatatgtattttaggcacgaggtcatcgtcagtaagcgatgcatactcatttattttctgacggaatggctcaacattttcttgtggcagtgaaagtcctgcagccatcggatggccaccaaacttcgtgaacagctcactgcatttgcacatttcctcatacatggagtactcctctatcgagcggcctgagccctttactccgtcctcactctttgtgagtataaaggttggcttattgtatctctccctgatacggcctgctatgattcctgctatgctctcatgcacatccggcagatatatgacaagcaccctgtctttttcgtaattgtccctctcatatatctcaactgcggtttccacaccctttgcagtcatttcctttctgtcatcattgagcgctacaagctctgatgcgatgcgcatggcctcatcctgcctgtcgcataaaaacagctcaagtgctcttttggctgtatccagacggcctgtcgcattgacacagggtccaagaacaaatccaaaatgatatgcatctacactttcagcctctatattacaacattcaagcagggctttcatgccgatatttgtcgtatgatgaatactctttaaaccggcctttacgagtatacggttttcacctgtcagcggcatgacatcaccgactgttgcaaatgccacattctctataaaatccatggcctctttctcatctatgccgatttttctatatagtaatatgacaattttccaggcaacagctgctccgcaaagctccttgtacggatagctgcactctatctgatgcggatttacaacggcatctgctttgttctccttgtaaatctttataccctttatatcttcaaaaggcactgcatggtggtctgttaccagaaccgtcattccaagctcctttgcatgggcgatttcctcaatcgccgcaattccgttgtcacaggtgaccacagtgtctatcccgtcctcatgtgccttgtcaatcagatgcacattcaaaccatagccatccttcactctgtcgggaatcatataatccacacatgcaccggctcttttaagtgccttcacaagaatatatgtagacatcactccgtctatatcatagtcgccgattatcctgattttggccttgtcagctatcttttgggcaagaatgtcaaccagcctctgaccatcctttaaaagagccgggtctgcaatgtctgagattttgccgtttaaaaattcatttaccgcgtcatctcctataacacctctgtttctgattatccgagccgtcacctgatctattccaaacttcgctccgattgccgcaaaatcagccttcttcgcactaacataccactttgccataatctaccctttccaggctcagcccacacgccggtgctgtgtagcctgcctgtgccctatcctttgaagctaaaatttccatcacagcatccggatttttccttccatcgcccacctcgataagcgttcctgtgatgattcttatcatattctgtaaaaatccatctccggtgtagctgataacaatatcagcgcctgttttttctatatcaatagaaaaaatcgtcctgaccgttgactttttcatatgtttgttaccacaaaaggctttaaaatcatgctctccgagaagatacgctgctgcttttttcatccggtctgtgtcaagcggcttatcatagtcgtatacatattttctcctgaacacatctgacacaataccggtgtgtattgtatacacatatgtctttgacacagcattgtacctggcatgaaatctgtcaggcacatttgaaatatctgtcaccgcaatatctgccggcagatgctcattcagccatataaatatctcatcctttgaaaaatgcttcggcatgtgaaaacttgccacctgccccaccgcatgcactccagcatccgtgcgccctgagcctatgacctcaaccggctttcctgccagtgtggaaagcacatgctgaagcttcccctgtattgtatcatctgtggatttctgcacctgccagcctttgtaacgtgtgccgtcgtatgccacaattatcttgtaattttgggtttctgtattcataaaattgtctttctttatctaaaaatagggttctgaatagttacttttattttatataatatcacatcattttttctcttgccagcactgttttgctcctttaatccaattaagcaagctccgcaatacgtgtcacagcgacatatatatttgatatctcataccatgtattgtagtccaccacacctgataccggaagtccgaatacagcctgaaatttttccacggccgcctttgtctttgggccgtatattccatccggcacaatagacggaatggccggatatgcctttgcgatgcgggcgagctgtttttgtatctggtatacattctgccctgacgagcctatgcctatattgtagccgggccatgacgccggtattcctgatacagcctccgcggtgttgatatacatgttgcttccgtaaaagtatctgagtatctcaattgcactgtagccctgatcaccaaggcttttagagccccactgtgtcatccaactcggacaggaaaccttctgtccgtcacagtactgcgtcagaatcggctgcttcacattaggtctcgacagatagttttcaaacatttcatttactatcagcgagatattgtcatatatatttctgccatagatgaatttgtggtcatatgctgtggacgaagtaatattaaaattatagccctttccgcgataaaactccgtatatatcctgtttaatgtaaatgacataattgcaagcacatttgcccttatagtggcatcaggccatgtcgcatatatctcactggatgcgacatttttgatgtagtccttatatctgacataataatttgccgctgtggaatccgatggtgccccatcatgcacaataacatattccggaatcacaacacgattaagtacaatctcaccggtctcagcaaccggcataatctccggctcaggtatcttggcaggataatcaccgtagagtgtatgtgccggaataacaatattgtccacatcatttcccggtgcatcaagtacttccagctcaatatcctgtatggaaagtctgtcgggcatcacctcaacgcccgaaaccgtgatatttctgtatccgttagctgaaacagttaccgtcacctccgaatacggctgtgactcactgggcgacatagaatactcaagtggcggagtggcaatctcaactgcctctatgcttcccgattcgttggtgtcagtttcctctatcttcccctgcggatccccggaatagctgactgacacccttgcatccgcaaccggcgtccccatgtttttctgtcgtactctcacctgaagccgcccctcatcaattgactcctgttgtaaaatgtgcagatttttcatgaatattattaccttaatatctttttacaataatatgcacaaagtgcagcgcatatgatataatgagcgtaggcaacgagcagtgccaaattgaaaatatataaaaatgccagcttgctgagcactttttatatatttttaatttgatagggcgactgcccgtacagtcaggaaaatctcagatttttctgacttgcactgcgtacaatacacttactaaggtggttgggggacgtgctctcatctgatccgagtcttacggaaaggatgattattatggtttcttggaacgacttatttactttcgttatcatgctggtagcgattctgacatacatagatactcacagaaaacataagaaatagccgtcctgcctctggtaaagtctgggaacggctatctcttacgataacttattaacttaatttgccggatcaggtgaagtgcactcacctaccgactgccttactaagtgtattatatgtcacttagcagcatttgtcaattttattaatattaaggaggaaaattatgcatacatttcagccatatccaatcgacatgctcgatatcaatccattcaccaagctcagtaaggagtgggctctcgtgacagccggcgacaaggaaaactcaaacaccatgaccgtttcatggggtggaaccggtgtcctctggggcaaaaatgtcgtatttatttttatcagggaatcaagatatactaaggatttcatagacaatggtgagtttttctcactttctttccttagcgagaaataccgcgatgccttaaaatactgtggtgctcactcaggacgcggagaagacaaatggtcaaaggccggtctgtctcctgctacacgccatggcataccatatccggatgaggcaaatctcgtattcctctgtcgcaagatggctgctgtgcctattgaagaggcttcatttacagacaaagccattatgcatcaatggtacggcgatcacgatatgcacactatgtatgttggtgaaattattgaggttgcggctcgctaattttatgacaatactacggaatgaggtctgcatatgtatgtgtttgtgcgctcagtactacgggacgagaagaaccataacatatatttatgcgcttaaaactacgtgactaagataattgtaagaattatgctttaatgttttctatgcttgacgaaaccggcttttatgcgccgtccatggcgcataacgccttgccctgccttccatggcagggcatttctgtgtttcatggcataattctaacaatatctaagtcacttcgtaatcgcttataaatacatgttagggttcttctcgtccctttctctttggcaatatatatatattagccgactctttaaaatgtatcacggcgtaaggggcaatatctgccaacagatattgccccttattaataccataatctagcggcagccggtactcatagcttcaatggccacggcaccaccgcgcacaaccgagatatgcttgtactgtgatttgagcagggctataagatcatcattgcggtgctctgtgagcttgctctctaagatcacgctgtcggcattcttgtccaccacgtcaatattaaaaacctgcgctgtctggaagatatcggtaatttcctcgcgggtgagcttagataccctgacatagaggatttccttcatatgcagaggcacatcagtcaggtcaataaccttgatgacctcgaccattctgttgagctgcttttttatctgctcaaaggtaatatcatcgcttgtaacgcaaatagtcattctggaaatagtctcatcctctgtggttccaaccgtaagagactgtaaattgtaggattttgcagagaaaagtcctgaaacctttgctaaaacaccgacttcattctccacataaagtgcaatccatctgtttttcatttcaatattattcatcttctgcacctcctactttaaaatcatttcgctcataggatttccgctcttgaccattggaagaacaatctcatccgtagctatcataaactcaataattacaggtacatccttatatttcttggcctctgcaaaggctgcatcgatatccgcttccttttccacgcggattccgtgtccaccatagctttcaacaagcttgataaaatccggtgtgtatggcggacatgcctcatttggtcccttgcactcagccggacagccctttcttcttcgaaggcaggttgcagaataacgcttgccataaaaaagctgctgcatctggcgcaccatgcccagatagtagttgttgagcacgcatatggtcactcctgctccctgtacaactgaggtggcaagctcctgtatattcatctgaagtccaccgtcaccactaatgcatacaacatccttgtcaggatttgcaatctttgcacctattgctgccggaagaccaaagcccatagttccaagacctcccgatgtaagaagctggctgttgctgtcaagctctaagtactgtgtagcccacatctgatgctgacctacatctgtaacgtagattgcatccttatagttcttattgatatgctccataatcatctgaggtgtcatgcccttgtctcttctcatgccaagaggattttcctcatcccatgccttaatctgcttctgccactcagcagtctttatcggctcagcccactcgtttaacttgtcgagtgccacattggcatcggcaacgataggcacatcaaccactacatttcgtgaaatagatgcagtatccacatcaatatgtacaatctttgcctttggagcgaactcatttaagtcaccggttattctatcattaaatcgtgtacctattgaaaaaagtaaatcacactcactgactgccttgtttgccgcatatttgccgtgcataccacagtttcccacataaagcggatgagtggtaggtatagctcccttacccattattgtagtgacaacaggcacattctctgcctccgcaaaacggcgcagattttcatttgccctggcaacatttataccgcctcctgcaaggataagcggttttttggcactctttaacatcttgtaggcgcgcttaagctgtccgacatgtactgtatcatttacacgatagcctctgatttccaccttatccggatactctgccggaccggatgcagtctgtatatcctttggcaggtcaatcagtacagggcccggctttccggtccttgcaatatgaaatgccatctttatgatttttccaaggtcctttctgtcacggactgtaacagaatactttgtgatatttctggtgattccgactatatccacttcctgaaaggcatcatttccgataagtggaagcggtacctgtcctgtaaagcacacaagtggcacattgtcataatgcgcatctgcaagacctgtaactgtgttggtagcacctggaccgcttgtcacaaggcagacacccaccttgcctgtagacttggcatagccctcagcctcatgaatcaggccctgttcatgtctaggcagaaccagattgattgaattagtcttgtataactcatcgaataaatctgtaaccgttcctcccggataggcaaaaatagtatctacgccttcctcctccaatgcttttacaaataattttcttcctgtgatgtccatactgctgtcatcctcgtttctatttaatagtttattttactttctcatatcgaaggaaataaaactccaaatcaaagtatgtctgctcttcgctgtctcccgtaatctgccactcaggcttctcgtcaagatttggaaaatatgcatccgcatcatactcaaagtccacctttgtaatgtgggctacatcgcattcatccacgagctgctcataaattttctgtccaccaatgatataaatatcctcagaattgtatttttcaagctccttgtgaagctcatcaagtgagtgaaccacgacagcgccctccacctcataggatgggttatgtgtgagcactatgttggttctgttcttaagaggtctgctgtttggaaagctctcaagtgtctttctgcccatgactacaacctttcctgtagtcatctcgcggaaaaacttctgatccataggtatccgaacgagcaactggttattttttccaattgcccagttattgtcaactgctgctattaaattcatgattttctccctgttgtaatcgttgctgttcacactacgtagtgaacaataaccttcttataactgcttcatatccacattctttaaaccgcaataggtatatccttaatctgctcacctgtcacatagtctgttatcttgatatcatcagtcgtaaactgatagaaatcctttatgtcaggattgagccagaactttggagcatcgtactgcggtctctcaatcagctccttcacaattggcacatgcctgtcgtaaatgtgtgcatctgcaatcacgtgcaccagctctccgactctcatatcacacacctgcgccagcatatgcataagcaccgcatactggcatacattccaattgttcgctgcaagcacatcctgtgagcgctggtttaagataccatttaatgtgagcctgtcatcaccctttttctgtgtcacgttgaatgtcatgctgtatgcgcacggatacagattcatctcatgcagatcctgatgcacatatatattggtaagtattcttcttgaaaaaggtgtatgcttcaaatcatagatgactctgtccacctgatccatcatgccttccttatattgatgctttacaccaagctgatatccgtaggccttgccgattgaaccatcctcatctgcccactcatcccacacatggctttttaaatcatggatattgttggatttcttctgccatatccaaagaagctcatccgttgcactcttgatatatgtctttcttaaagtgatagccggaaactcctttgacaaatcatatctgttgacgacaccaaacttctttattgtataggcgcttgtgccgtcctcccagtggggacgcaccagctctccctcagtgcttgtgccattttccagaatatcctgacacatcgctacaaaaactttatctgcataactcatattatctgctccctaaccataagtattcaaccgatacaattacccgtttactgtctattgtatctaattatcaattttttttcaatatattcaatgtgcaaattcaaatgatttttttagcttttttcttcataaattatttaagttttttattattcttttcgattaaggacacaatttggacaaatttatttagtatagtaatacctgtaaaggagatacacctttacaaattcccttttttaaacattttttcataaactaaactcctcgaaaagaagccgcttccctcggcttcttttcacgttatgggggtttacatttcaggctttttcccatattatgattaaaggatcaaaaagtagagtcagattacgcgaatgcgtagcatgcagtaatctgattaatcataaatgaggagattcacaatcacatgaaattttttctcgcaccgatgcaagggctgaccggatatacagtaagaaacgcattccaccaccattttgactacatagacaaatactacacaccgttcatccctgccgcaaagcgcatgaatgccaagataaaaagagacatcgacccggtaaacaacgacggaatcactctcataccgcaggccatgtctatagtggcagatgaggtcatcgacctgcacaggcagcttgttccttacggatatgatgaaataaatgtaaatctcggctgtccgtcaggcaccgtcgtatccaagaaacgaggctccggcatactcgcatatcctgatatgctggatagcttcctcgatgagctgtatacaaaagctgattttcctgtttcaataaaaacccgcgttggctttaacgatgatgagctatggcccaggcttatcgaaatatacagtaaatatccgataagtgagcttatcgtgcatccgagagtccagaaggatttttataaaaatacgccacgcatggatgacttcgccctcgccatgcaaaaaataaatcctgataaaacaacactgtgctacaacggagatatcactgatactaatagtttcaaggcactaaccgactgtttccctgatattgatgaaatcatgataggccgcggactgtttgcaaatcctgctcttatcgcagagctaaaaggtataagcatggataaagccgagcttcgcgagcgcttaaagaactggcatgatgagattttatccggttatctgtccatcttttccggtgaaaaggatgccattttccgcatgaaggaaatctgggcatatatgcatgggctgttttctgactctgaaaagctctggaagaaaattaaaaaatgccagacgcttaatgactataagtcaatcgttcgaatggcatttgatgctttttaaaatataaacactttactttcttgcaattctgtgaagctgtggccttatggtgatatctgtcatcacaaggccttctctttgccccaaaacataaagcactgcttctgcaacctcatttggctgtattcttgcagcttcattttcatccactgtaaaatcagcattcctgtacagattggtgtcggtcatatcaggctctaaattcaccacacgcacaccgtactttctcgcctcctcaaacaggctgtgggaaaagctcgtaagccccgcctttgtggcaccataggcacagccgtgcggattcgtcttttcagcagtgattgatgagatatttattattgttcctttgtttttctttaaatcgcgaagcagcagatttgtgataatcatcggtgcctcaagatttgtcctcaccatctgtgatatttttacaggattaagctcctcatgaagcgcgtaaaatccgacgcctgcattgtttatgagaagtgatatgtcatgatttttattaatttcttttattgtcttgatgagctttgcggtatcggtaatatcgcatactatacgctctatccctgcaatatcatcactttgattgaagcttcttcctattccgtaaaccagccagccattcgctgcaagctgcctgcatatagcttttccgatgccggaagacgctccggttacaattgctttgttcatctgattgctcctttatactttaaccctttaatcatactatgtgatatatatattgaaaatgtattgcaataatatcacttccacataaatatcctgtccttatccacatattcggatacagcctgtatcataaattcttccatatcacttcgtatgttttccggatactggtaatacccattcacattgtcgtatggaaaattcaccacagcactacaaggcatgtcctttcgcattttcttcagataatcctgagatatgcggaagcttccgatactcacatcccacagcttagaaccgtctatctgtgaaaatacgtcaccaaccatcctgctgtattcacctctccagtccttgcagtatatcatcggatcaaagcacagtcgcactggaaatccactatccatagcacattttgctgcctgaattcgctccataggtgcggacgcaaaatgctcatactctgctgcaatcctttgaggcgaaactgtataggcaataattaccctgtcacaggcttcgtaattgctcaacaaatcacacctgccactcttggtgcggatttcaattgtaagattctcatgcttctttgtaaaagcaatccattccctcacaaagccggtaagcgactctatggccacgaggtctgcatcatatgacacgcaaagatatatgcttttttgcgccagaagtgcttcaagctccgcaaaaatatcctccaaatttacaaacaccacaagattaccagacggatacatgccctttaaatagcagtattcgcagtcaaatatgcagttcatcatgcatgagcaatagtagaaattctcatttccaaagctctgacacaccggtgcaccttcatatatgcagccgcttgtattctctgccagaatgagcgccttggcattgctttgagcagaaatactctgctttttgcggcagaaaacatccttgtagtggtcaatttctatgactgttgtattattcagcttttctaaaacctgctttgtacgtggatgctcggccacgcctttttccacatatacatgtgaaaacattttattgtattggcacatttgacatttccttcttacaacaatctctgtttcaattcaaacagacatttctttccttcacgcttgctctcacacggcagcaagccatttgtatagtactcatcaagaacagctttataatctataccacttagtctgcaatactttataagctgtgccagctgatcccccattaccttggaacaacgcatatcgcaaatcagcctatccatattccaagaggatttagtatcatctgtcgcattgccgtctgccatattttcgcctttagtcttatcatctattgaagttttattaccacctacacttaaaagtatatcaatatagccgcatattttgtcttcctgcaaagcaaaaagctctgtgattttcgactggtcaattctctcaccggcatctgaaacaagctttataaaatgcatacgatgcggtcccacgaaaaacgctgctgcctgatatacggcggctgcctccatatcatatacaaccgaatcacacccttcattaagcacccttgcgaccgttactatctcacactccctgaaatttgctttcatcagcatatcggggtaaaatgtacgccctgtcatctgctcagtgagcttgttccccagaaatatactgcccaaacagatatcactgctaaaaccagcgccacaccccacattcaaaatctcatcatccggtgaaatcccatacgcaccaccgatatttgaaaccgctgccgccgcattgatttctcctacgcctgttatcacaagcctgatactctcatttacaaacacatcaaatctgaccctttcagggcttttttccttttttaagccatagtggtctattatattttttgcctcagcataaaaagcgctaaatatataaatcatagataattccttcaaatcttccctgcatacatcaacaggatttatctctcaagctcctttaaaagccttgtcctgttgcttccaaccatgagcttttcattgtagatatcaaatttttcacattcattctcagctaaaaagctgctgatttccggtgtgatggtcagctctgtaacaaagacaagcatctcctggccgtccgagaatacatcctccacaaaatcaaatgcatgatttagcttctctcctgccgcatcctccatagttgaaagcttctctgattcttcggtaaaatcatccatcaccgtatcaaaatccccttttatatgccttaatacatcctgtctgatgtaatactcctttggcaaaataagagagctctccttcaatatctccatattctttgaaaactgctccacagcactgttgtacagcgcatgctgctcttcagtgcttctttgtgactttctgtattccttcaaaaactcataccatagctgcaccattttccgctctctggccacatccgaaaaaacaactgtcagtccgcttaaaagcagattcaccacagtgattctctcatcgaaatcagcatcaaacacacgtttatatactgactttttcacgtttccggacaatatatcgcttataccgtaatcctcattgtattttctgtagatttccagatatgcgtacacatcctctgctatatcaggatggtggataaactcacctattacatcctccgtgactgcaagttctcccgcctcgtacaccttaagcaggctgcttaaatcctcccagcctcttgccgtgacgaaattcataccgtccacgtcagtttccaccctgtaaaaattgtttgggtgaagctcaagatagcttaaaagtgcatcatggatatgcacatctctggcatattccttccacacctgatagtccgcttctatcgatatatatctgacacggtccagcgtaaccatatcaaaatcgcgcactgatttattgtactcaggcggatttcctgccgcaacaatcacccagcccttgggaacagcctgattgccaaatgtcttgcactgcaaaaactgaagcatcgtaggcgcaagtgtctcggacacgcagtttatctcatcaataaaaagtatgccctccttaagccctgttgcttccatcttttcataaacgctggctataatctcgctcatcgtgtattccgtgacggaatagctctttccgtcatactcacgctcctttataaacggcagtcctaccgctgactggcgcgtgtgatgcgtgatggtatatgccacaagacctattttgcactctcttgcaatctgctccataatctgtgtcttgcctacgccgggcggtccgattaagagcatcggtctctgcctgatctgcggtatcacgtactctccatgtgcatcctttgacaggtatgctttcactgtatttttcacttcgttttttgcctgttttatattcatattgtttcctccagctccacctgcatcgcccatggcggcacctcattaccctcatatgcaccaaccgacacaaatgcgcacttgtacgatggacactttgccgggaaaattcccttgccatcagtaaaatatataagtccgcacatgttcttaagctctcccttatccagaaggtctctcacatacgaaaatgccggtctgaaatctgtgcctccgcctcctacgagcgtaaacttgtttaaaagcggcttaatctgcttttcatctgtaatttcctcgtccgtctttacgctgtcatcacactgtatgatgcgtattttattcctgacaaaaaaactgtcagactccgtgagaatcgtaaaggtctcctgtaaaaagtgctccaccagctccccactcacagaatagctcgtatcaagtactatgacaaaatcccttatcttgtatgtctccctcgtttcaagaggctcaatgagcggcatattgccgtaaagcgaaagtccatacgcgtaataccccatatcaaaggaatcataatctgcgtgtacctcctcacgaagcactgcaaacctgcgcagaaactccttgtagcttcgtctgcttcttttcgcggacagctccctcatcattacctgctcgccctcggatttgctgtcctttgaatggcttttctccatgcgtgtctgtctggatattttctgccactgcttttgggcctcggatgagcttagtggcatagcattgtcgtttttctcctccggccacaaagagtggtcatctgtgtaaaattcccgtgccagaagtgcaagctcatttttatcctttgtgtttgcaatatcatctatatcagtgatttcttcagcctttatttctgcatactgcttgtatagccatgcgtacaaagctccgggagcaatcacgatatgctcttttttaagcctctcatacgtggtttttcttatatagcttaggatacgctttgtgcttttcttttccattgtatcaatcgtgtactcaaccattatatcacatgctgtattccacaggaattcatccctctcacctttagtccacaggtgaaaaaacagacagtgcagcacactgtgcagataagcccggttcagatacatgccatttttcttaaatatatcaatcagcctgattggattataataaatatatgtgccgtcagttgccatggagtaaagctgctcgttcacctttggggaaagagccgagagcgccagcttcataaaaggcatgtcgagatacaactcgcactgtatttcatctattattttctgtgacatttcctcctgccactctgaatctgtcttgatatgttttttcatgaagctgcctccttccccatatacttcacaaaccctattattctgctgcaatattttcagagtttattatactatagtaaccttattttctcaataaaatgtgactcacaaacaacatcttaaaaagtatatttaaaaagtaatcccagatagttcatgataaaatcataagctatccgggattataagtttattacactataaacattcaataattacacgctcacatttatcatacccgagctgtgagctgttcaggcacaacgtataattagcagcttttccccatttctgatctgtgtaaaaattataatttgtcatacgccttttatctatgtcatttatcatttttactgcatcagcttctgaagtattatgcagcttacagatacgctgtattttttccggcatatccccatggatatacacattcaatacatcatccctgtctttcaaaatataatcagcatttcttccaataatcacacatggctctttttctgccagatccaaaatcacttttctctgtgcctcatataccatatcttctactgattttcctgtaatatcacgaccggcaaatgcatatgcaaaaatccctttctttggggacagctcagcattttccttaatatactccggtgccattcctgactcttttgcaatctgtccaattatttccttgtcataatatttaattccaagtttctttgcgacttcttctccgataaaacgtccgccacttccaaactctcggcttatcgtaacgattctttttgtcatggcttatgcctccttaatttaagctttccactttatttttattgattctctttaaaaataaatatcctacaatacaagcagtcacctccgtgattggaaatgcccaccagatcagcgaaactccaatatatccgcctcttacaaaaaatgagaagatgcctgccaaaggtaatataattataagctgtctgagcagtgaaatcacaagcgattccataccaccatcaagcgcctggtaaataccctgatatgccacatttattccggcaaaaataaagctgatggaaacaattctcattgccccgataaaatattctcttgatgctcctgcattgaacaaagcagcaaattctcccgggaaaatttctgtaatcgctactcctatgaccataagcacaatcgtataaagcaatccatacctgatgccatccttaattctctttttgctgtgcattccatatgaaaaagctataattggtgtaattgcatcccttagtccgaatgcaaggaacaatacaaactgctgcaccttataaaacaaaccatatgcagtctgtgccgaaggactaaatttcaaaataagattcatcacataaaccataattgacatcagagcctgtgcaataatagccggaagtccaattgcataaatttccctgattattcctctatcaggcttcatatactttgtatcatgctcaaattccctgttcagcttcatatgaaacacaaacagcaatattgcagacacaacctgaccgataacagttgcatatgcggcgcccttaactcccatttccggaaccggtccaataccataaatcataataggatcaagaataatatttaccactgctccaactacctgaccaattgtagaataaagagaacgtccagttgcctgcagcagcttttcaaataatgaaaagaaaataattccaaatgaaatcacacagcatattctcaagtaatttgttcccattgaaataacttgaggatcaacggtctgtgatgaaatataagctttaactccaaaaattccaaacaacaggcatactatataaattattgcaccaagaaataaactgtttcctgcaacctttgcagcttttttactatttccctgaccaagtgttcttgcaagaagtgcattggttcccactcctgttccaattccaactgctaccataagcatctgaaccggaaataccagtgtcagtgcattaagtgctgcctcacttcctgacctcatatttcccacaaaggcgctgtctacaatattgtaaactgcctgcaatgccatagataaaatcatcggtattcccatctgtaccatgagcttatttaccggcatgtccttcatcttgttactttctgccatcttaacttattcctccttttctgcataaaaaaagtgtgctcttatctcataagctggacttacgctgataagctacacactttataatgcactatatattttaatgatgtgcgacagcaggtgcacaaaaaaagagcagctaaactggatttacgctagtctgctactcgttcataggctattatatttttatttttgaaaaaagtcaaataatttttgagcaataacataacctttgcatttacacttaaatttaaaattcaaaccgcctcttcctggataccgacagattttccttcttaaatctatgcaaaatcacactgccctcactccattcatcctgtgctgcaagtacaagcatatcagtaacagccaggacatctgcgataaaattctcctcatcatctttaagctccagaaaactctgcagcaaacccgaatccctttttcttatgataagctcagacagcctttttttatgattgacaatatactccaaaaactgctgcctagcttcttttgaaagctcatacgcataaataagcctgtaaaaagccatatctaaaaggtcatcctcactctcctgcgcaatcgcctctgaaaatatttcatcatactgcttccacacaaacacgcggtccataaaagcctgtctggcgcgaaaaccttctccgttcatgttcagtttaaaaatatgagcaggaccaatctcatcatatgtctggtcgtactcgaaaaaacatgcctgcgcaatcgcatttccatcgctgtcagcccatctaaccctcacaagagtgcttatctgtgaaagaatctgcttaagacacgacttatccttcggtgagcctctcatcacaagcatataaagttttgtgcagttcatgaaagcgtcaccatccacatcacatatgtcggatggcagctcaagcacagacagccttgaacaattataaaagcacagcctgccaattttttgcattccgtccggcaatatgaccctctcgatataatcatcacacagctccgtcatatcaggacgcagaatatcatcaatcccaagctctgttttcaatttttcaggcatgctcttgaaagaaaagcaatactccgcaagctccgtcactctcatgccgtcaagcatatccggcaccacacacaccggatttttcccatacatatgaagaagcctaatgcaatcatcattaagcctctcatatacacatatattattgttatcttttgtaatctttaaatctgtcattttatttctttaactcttaaaaatttcacacagctgcaagccttatccaagtctcaataagtcatttattgtgttcttaaaatcataaaacaaatcaatatatttttcaacaattgtattacaatgtgtcctcacaacctcacaatcatagtcatgtgcaagttcatttctgaccttaagcatatccatccacgcatcatcagaaatcagctttgccttgaaggattcacgtaacacctctcgcggtgaacctgtaacaaacccggttatcgaataatattgtaccagaatatctttcattaccttccacgataaatcaaaagtaatgctaaatttagcacttgtcccactcaaaacaaacgaatcggaaaggtctctctgccttgcctcagctaacgcatctagtgaattacaaaaagatttaaaacgtctctcaaattttgcgtccatactgtctgatatcctccaataataaatcattcctgcatgtatccaaattcagtaaatcaacactgtacaaggtaggtaagtcctccacttcatcagaaagcgtatcaaaatccttcactcccgataccgctatatcaatatcactgcgttccaatgcagtacctttagctcttgaaccatataaaattaccttttgggcatcatgctgtctgcaaagctctgcaaccctgcttataacctcttcaaccttcactaatctaacctcatataaaaataatctgcactacatatgagttagtttatcacaattcctacattatttccaccacaacgtaaggggcgctgccgcgggcaccgcggtggcacacgtactatcacgtgtgcgaatagcgcagtgagttagatactgtagaaattatgccatgaagcgcagaaacgcccctgcaaggacgcaggggcgaggagaatcgcgccacggacggcgcgtttcgacggtttcgtcaagcatagaaacccttcaagcataatttcgtacagtatcttacccacgaagcgtagcacgcgggatagtgcgtgtgccaccgcggtacccgcggcagcgccccttactacatccaaaatctactcaagcagattcttcatactgttcacacttataagaattgtcgatccattgtgcaaaagtgctgtcgtagtcggcggaagcacacctgccacaccaagagcaataagccctgagttaaaaccaacaatctttcgatagttgctctttatacgtttcataagagcattacttatatatttaagagttacaatctggtagagatcatccgagcccaccgtaatatcagcaatctcgcgggcaatttcagcgccgtcactgattgcaataccgacatttgccgcagaaagagccggtgaatcatttatgccgtcaccaatcataatgacctttctgcccttagccttttctctctccacaaaggctgccttgtcctcaggtaaaacctcggcgtaatattcatctacacctacttttttcgcaatgacagaagctgtacgctcactgtcgcctgtcatcatgacaacctttgatatgcccgccttctttaatgaagtaacaaccgccgctgcctcatcacgcagaggatcctctatacagataactgccgaaagcttaccctcaatagccagatacaggtgagaataatacagcggaagcgactcaaacagtggctcctttcctgcaggaacaacacatttttcatcctcaaagacaaaatgatagcttccgataacagtacgcttgccattgatggaggttgcaattccatgagccacaatatactccacctttgtatgcatttcctcgtgggaaagccccttcttagacgcagcgtctaccactgcctttgccattgaatgagggaaatgctcctccagacaggctgcaacacgaagcatgtcatcagatgaatactcatcattgaagttcaccacatcaaccacagtcggatgtgcctttgtgagtgtaccggtcttgtcaaagacgatggtatcagcctctgcaacagcctcaaggaactttcctccctttactgttacattataaaggcttgcctctctgatagcagaaagcactgagattggcatagcaagcttaagtgcacagcaaaaatccaccatgagaattgacatagcctttgtcacatttcttgtcagaagatatgtaagccctgtagctccaagcgtccacggcacaagcttgtcagcatagtgctcagcctttccctccagctcagatttaagcttttcggactcctctatcatagtaacaatctggtcaaaacggttgtttccttcaacctccttgaccctgatagtaatctcgccctcctcgacaacagtgcctgcaaacacagtattgccgacagttctttgaaccggaaccgactcacctgtcagggaagcctgattgaccatcgcatcgccatctaagacctctccgtcgaacggtatgacatttcccatgtggacaacaaccttgtcgcccttttcaatctttgaggactcaacgagtatctcctgattctcaggtgtcctaagccataccttgctcacattaagcgacatgcttctggccaggtcatcaacagacttcttgtgtgtccattcctccaaaagctcacctattccaagcagaaacataatagagcttgcggtagaaaaatcctttgtgacaagcgaaaccgtgatggcagtagcatcaagcaccggcacctcaatttttctctgcagcagacacttaagcccaattccaatatactttacagatcgtccaatagtaagcgctatcctgattggcaaaggcagcaggagctttttactgtaatgccagacaacacttccgataagtttttcctgatatgaattattaagctctcttcctgatgtcttgataacagtctgtggcacattggcgctctcataatgaaagtggcgtagcagctctatgatctgctctctgtctcctacatactcaatcacggcatcagcagtcctgtcataaacctttacaaaggtaacattcctgtgattgtgaatcacataaagcagagtgtccgcctgctcatatgtcatgcggtactgctccatatgaacacgcatacggcctcttgactcatgcttaatcgtaaatttcatatgaccgcctcttatcttctatgcctcagcagtctctgctgtaacctcagcctgctctgcttcctgctcatcagccttagcacactcgcatacatcctcagatgcatccgaaaccttagcagcctcagccttagcctcgcgctcctcgttgatgctcttagcctcagcaagaatatcctctgcattctcctgaacagtattaacagtcttcataacacaatccttagcacgaagcgctgctgctgtacactgagtataagcatgcttagcatccttgcttgataaaatcttgataccagctgtaccaaaagcaacacctgctgcgaataaacctgaagccttccaattaaatgacataatgttttcctcctgtatatttacaaaaattctggttaaagtttacttacaagaaacattatatttcccggaaatactgttattcaagcctaatctcatacagttctagctaatccatgtccgcaaatcccactgccatgcgccttcccggacttattgataaagtttatcacttcaattgatacatacacaaaagcataacaacatcgactgcgatattcttgatttcaagtatttcgttaccttcattggtgacaacacattcagcttttacattaccatcttcaagtacatacatattacctttttcaagatagcgatcaaccatgctctcctgttcatcagctaatagcaataatgatataaactgctttttattttcattcacttctctgattttcatatccattactccgtcaaacaaacaggtggatttgatggtcaaaaggtattctctccaactgaagatatattatgaccatcaaatataatatttattagtaattcaaaagattacatttttgatacaaattctgcaatttgaccatcaacatataggatgtgattaactaaccactctgtgagatactttaaaatacccataatctgttcatcctgatcttttatttcatcattgtgatgttcaataaattcatcaagtttgtgtataaattcctgatgctgaattttttgagtaaataattttttataattaatagactccatatactgctcttcatcattaaaatgtttcgctgtataatcacgaaggtcttcaagtatcatgtcaattctatcatatttatctggtgtattctcgtcatgaagcagttcatatgcatcatctgcatatttaaacaactgcttatgctcttcgtctatcatatctatgccgatataatattctggtttcatttcatacataaattaatcctactttcattcttattcttcttttgaaatccacgtaatacaagtatacaatggaaaacactattatcttatatatcatcggttccttccaaaacattctctaattatctttgaaatatccgaatcaataaaatctttctgtgccatgtcatcaaggatatcacatgttttttcatgagataatccttttttataaggtctatcttccgtaagagcctgataaatatcaacacatgccatcatacgttccggttcatttaattcagcagcggtttttccaaaaggatacccctttccatttaatttttcatgatggaaagctgcccagtctcgtatttcttcaaaatcattaacctctgataatataaggtatgtatagccagcatgatttttcattttagaaaattcatcatccgtaagcttatccggtttttccagaatttcattgcctaccgccatttttcctatatcatgcagagcaccagctaaatacattttctgtacagtgattgaatcatatcccatatattgggcaagcatggatgctttttcagctactcctatagaatgtctgcttgtaaaagaagatttataatctacaatctttgcaaagaaatctgcaacatctttacacatttcccaatcaaaaacaagcttttctcttgggatagcttcccatagcttagtttcaaaagaatcatcacttaaacacataaacgattcttttgtgaatacatgaagaaaagcattaacacattccgaatcaaatagactatccttattttgtgaaagatattgacacataaaatcccagctattatcatcagaatcaatactatttcttataatatcaatgatatctgcaagatgaataatccttgcgaacaatggaatttcattccactttttttgaaaagggccagttccatcggcatgttcatgatgatacaaaatcacatttgaaacatctgttttaaaaggaagtttagtaatattcttttcaccatatatacaatggagattcgttttttcctcagataaatctttttttaggtcaataacagaatcctttttaagctcctcagaaatatattgtgtcagagcattgtcatgcagtaaagcacacatggctaaatcttgtaacgcctcaccttgaattttccaatattcagccatgcgtatacttatataagccactctttttccatgtttgtttttgatatttaccaactctgcttctatgcagtccaaagcataggaacaggctcctgtaagtccaacaatatctatacttagcatttccataatccatgcagattgcaatatgcatatacttcttctacctgctcaccatcgcaaagacaaaaatctgctaccggcacgcccttatcctttaccatttcaataatgtttccacagtgattgcatacataatattttacttccatcttttttctccttccatgtgtaaaaaataaaatctaaattgcttctataactttttattcttattaattaggattaattaaccataattattatatagtattatagtactttagtcaatataaaaacagtaattattcctattttaaaaattttatattatcctttattttcaaagaaacgcaaaaaatcaggtttaaaattcattaattatctagtatttatgtatcataaaaagtacagcctatttattgagactgcttattttatctgatacaataaggaaaattgaaattttattttataaggaggaatcaataatgagaggtgtcgaaacccgaattcaggaaatcagacataaaatctttacagaggttgcgcgtatggcatatcataccgaatggcctgtaaaagatcgtatggaagctcttccatacaagattattcctggcgaaaaaggaaatttcaggaacgatgtatttttggagcgtgctatagtcggagagagacttcgtctggcaatgggtctgccttaccgtagtgctgcagagcattcacctatatcagatggaatcgaggctgccgacaaagatgaaacctactatacaccgcctcttatcaatgttataaaatttgcatgtaatgcatgccctgaaaaaagagtacatgttacagacggctgtcagggatgtctggctcatccatgcatggaggtatgtccaaaagatgccatatcgctggatcgcacgaccggaaaatctgtaattgaccaggaaaaatgcataaaatgtggacgctgtgcaagcgtatgttcatataatgccattattgttcaggaacgtccatgtgcaaaggcctgtggcatggatgccatttcttctgacgaaaacggcaaagcaaatatcgattatgacaagtgtgtttcgtgcggacaatgccttgtcaactgtccttttggtgcgattgctgataaatcccagattttccagactatcagagctatacagtccggtgaaaaggtctatgctgcagttgctcctgcatttgttggacagtttggtccaaaagttactcccggaaagctacgtgcagccatgaaggctcttggttttgcagatgtatttgaagtagctataggtgcagacctctgtgccaagcaggaggccgaggacttcctaaaagaggtaccggatgagcttcctttcatggcaacctcatgttgtccggcatggtcagtcatggctaaaaaactcttccctgagcatgcaaaatgtatctcaatggcacttacacctatgacactcactgcacgtcttataaagcagcataatccagatgcgcgcgtggtatttatcggaccatgtgctgccaaaaaacttgaagctatgcgacgcagtgtacgaagtgaagtggattttgtcctcacatttgaagagatgaccggtattttttctgcaaagcatgtggaccttgaaaacatcgaggaagatcctgcaggtgtcagcgatgcttcaacagacggaagaaactttgcagtcgcaggaggtgtggcacaggctgttgttaatgtcataaagcgtgatcatccggatcaggaggtaaaggtagcaaacgcagaaggtttaaaggaatgccgtcagcttcttaaacttgcaactttaggcaagtatcccggatatctgcttgagggtatggcatgtcccggaggctgtgttgccggtgctggaaccatgcaggcaattaagaaatcacagacttctgtcggattgtatgcaaaacagtctactcataaaacatcaagtgaaactgagtatatcaaggagcttgacaagcttgtagattaatatcaataaaaaagaggatatatggatatgtataaatccatatgtcctcttttttattacaggttatcttataatataaaattagtaatagttattattttcaaatcatattctcttgataacttaaaataattatgctattttgcgttcaaaaacatatttactatctgatgataaatcagacctgaatatataaccaagcctgtcaaacttttttatatcatcaggattttcaatatcattttccgccatgaatcgaaccatctcaccacgagccatcttagcataagtaccttttgttaccagtttatttccagcttgttcgcagaatgaaattgtaatatatttatccttcggtgtaagatacttttctatacatttagaatattcctttgatgcaagattaattataattctgctttcatcaattactgaacgatacagcatatcattccagtactcatacagattttttgcatctcctatttcgacctttgcctgcatttccaagcgatatggcgttactccgtccataggttttaaaacaccgtaaaaagctgataatattctcaaatgattttgtacatactcaaactgactattttcaaacacggatggtgccatatattgaaaagcaattccttcatatgctaaaacagccggagtaagcctgttataaagatccatattttccaatctgttaaagttctgctctgcaatcttgtcattacatttccagatagctttcagttcttcttttgatttgctttttatccagtttaatacttctgctgtcttatcaatatagacaggcagttcaaccggtgctaagttatcggtatctacaatcatcttttttgcaggtgataaaataatcttcattatgccaattccttaagcatattttcaggatcatctgccgccttgactttatcatttgcctttataatgattccctgctcatcaataagataagtagttcttactacacccatagatacttttccataatttttcttttctttccagacatcatatgcttcaatgactttacgctccggatctgctaatagcgtaaatgccaggccgtatttttcttcaaatctcttatgagacgctacagagtccttgcttactccgagaataacagcgcccttctcagtaaactgtggataacgctcagaaaagccacatgcctgcttcgtacatcctggtgtattatcctttggataaaaatataagattactttttttcctgcataatcgcttaatttatgcatttctccgttctgatccggcaattcaaaatccggtgcttttattcctaactctaacatttactattcctccgcttttgtattttccacctgttttcttgttcttttattacctgaaatcattttatgaccagaatagactgccataatcatgcatatcagagagccaaatgcaaagtatttgtgtgctgcttttaaccctttatatcctgtataaaaagttccaaccattgtaactattgctccgattgaccaatatttatgtgctttcattttatacctccaaattgattaagctgtttccaaaataaatatctctggatcattaacaatattatacattccatccattactttcgacaagtagggaaagaaaaataatcattccaaatacaaaaggatgaatcacgataattctggcattaccttgacgcatcctttcgtgttgtatttttttattcttcttaatgacagctatggcttccgcatccatgctcaccacacgtttgtccttccccatggttgtgctcatggtgagaacacttcacatccggattataatcaagcgtatcattgataaaagcttctactgctttatccgcatctcctgaaactccgccaaaaagcttaatgcccgctgccgctaacgcagtctgagcacctcctccgattccgccgcagatcaaaacatcggcatttaaggcattaagaactcctgccaatgcaccatgtccgcttccattcgtatctactacttctgaatgtagcacttttcctttctctacatcgtaaatcttaaatgtctctgtgtgtccaaagtgttggaaaatctgtccattttcatatgttactgctattctcatgataccttctcctttttctactgcatatttttgataaatctcatgtttgtaacatcctccaaagctgcagtcgctgctctgaccgtcacatattatgaaatccccaccatcaattttaagcggatgtccatcaatgagagcatctgctattttctttctggcaatctcgtaaatccgttggaccgtcgttctagcaatctgcatagattctgcacactgctcctgactgtaacctttcttgtccaaaagacggattgtctcgtactcatctaccgtcagaacaatgggcatttttttctcagtatcatctgccggaagaaattctaaaacatttgggaaatggcagacttttctgcattttaccggtctcggcatgaaattgctcctttctcgcttttcttatataatagtcctataaagggcatatgtcaattattcgattgacgcatcttaaaaaagcaagtatactatgttcataaaggagataactattatgagcttcgaaaattattttccactatggaatgacttaaatacagcacagaaaaaactaatttcagacaatttgatcacacagcatgtgaaaaaaggaacaatcattcacaacgggaacatggattgtaccggattattactgattaaatccgggcagcttcgaacttacatactttcaaatgaaggacgagagattacactctaccgtctgttcgatatggatatatgtcttttatccgcctcatgtatcatacggtccattcaatttgaagtaaccattgaagcagaaaaagatactgatctttggatcatccctgctgaaatctataaaggcatcatgaaggattctgctcctgtcgcaaactataccaatgagttaatggctacccgtttttctgatgtcatgtggctgattgaacagattatgtggaagagtttggataagcgtgttgcttcatttcttttagaagaaacatccattgaaggaacaaatgaactgaaaatcactcacgaaactatcgcaaaccatcttggttcccacagggaagttatcactcgaatgcttcgatactttcaaagcgaggatctcgtcaaactctcccgcggcaaaatcacaatccttgattcaaaaagactggaaacactccaaaggtcataaaactgtttttctgtaacatataaagaagaatcctccatttatcagaattatgaaagtcattctaataaataggggatctttttatgctataagaaaattataaaaatatcgtgattattttttaataatccataccacatgcatatgccctttcaatcagcgcacggtcattgaccactgcatcatagaagcgaaatccgccagagaaattatacgtttcatagccgtttccttccagaatacggctcgcaatataactgcgcagaccactctggcatatcagatacacaggctttcctttctcaatttcactaatttgttctctcagttcatctacaggtatgtttttgaatccatcaatatgccccatgctgaattcacctacagttctcacatctagcaacaccacatctttatctctagaaatcttgtccatatcttccaaatgccattgctttaatgtcccttttgcaatattgtctatcataaatccagccatgtttaccggatccttggcagaagaataaggtgatgcatatgccagatccagatctttcaactgggttgcattcagtcccgcatgaattgctgttgccagcacatcaatacgtttatcaactccttcatatccaataatctgagcgccaagcaaacgatagctctctttttcaaaaatcaccttcatggtcatcacttttccaccaggatagtaaccggcatgactcataggagaaagaattactgtatctacctctaatcctgactttttggcattggtttcattgatacctgtagtggctgctgtcatatcaaacacttttataacggagcttccctgactgcccaagtaacgactatcaccgccacaaatattatcagcgatgattctgccctgtttattggctggtcctgccaaagaaatcagcgcatcattacccgtaacataatgttttacctgaactgcatcacctgcagcataaatatccggtacagaggtttccattctgtcattcactacaatactttccttgatgccaagttccagaccggcttcttttgctaatactgtgtctggtgtgactccgattgccagaactaccatatcagcctgaagggatggattatctttcaacagaacctccactccgttgtcttttcctttaaatccttctactgtataccccagtaccagttttatcccatgctttctcatttcattatggatcatggatgccatatccgggtcaaaagggttcatcagctgcttaggccgctggacaatcgtaacatccatgccaagctccctcaaattttctgccagttccagaccaataaaaccgccacctgccaatacagccgattttggatgattcttatttatatattcctttatccgaaaagtgtcttctacagtacgaagtgtaaaaagtttatcaatacctactccgggaagtctcggctgtgttggctttgcacctggagagaggatcagcttatcatagttttcttcaaatatttcaccgttttctaaattcttaactgaaacagttttacattcgggatgtattgagataacttcatgatgaattttcatgttaatacggaagcgtttaaaaaaactctctggtgtctgtagtgtaagttcttccgggtctgtgatcacgtctccaatataatatggaagtccacaatttgcataggatatgtatccggatctttcaaacacagtaatttcagcatgctcattcagtctgcgtattcttgctgcggctgtagctcctccggctacacctcctacgattattaccttcatcttatttttccacctttcctgagtaagctgcaatgccaccgatattatttactttagaatatcccattcgttgcaacatcccagttgcctgacggctccgggaaccggaataacagtatacaaacagagggatatccttattcttcgctacagaaacaatattgtctaattgctgcaacggcacatttttactttctggtatatgtccttcctgatattcctgcggagtacggacatccagcagaactgcaccagcagtcattttatattcttctatgccttgattaatattcgactgtttaaagaaatcaaaaaatcccattagcacacctccctaaagcatttctaaaatcgaattcttaggtctcgcccctgaaacctgctgtacaatcttcccattcttcataaccactaaagtcggaatgctcataatactgaacttatttgccagttcaggctcttcatctacattaatctttccaactttaatatccctacgctcatctgcaatctcctctacaataggtactaccctacggcaaggcgcacaccaagatgcccaaaaatctaaaagaacggttttatcggaattcagtacttcgttctcaaaattatttttattgatattaatagctgacattttacagtcctccttatctttttctttttgtagctttgttatagtcttaaattcatttgttttccgtgattacatcaccataccacattaaattaacttcttgccataccatctacacttaatataacacctgtaatgtaactcgcctcatctgatgcaagaaacacaaacgcattggcaatatcttctggctgtccaagacgacgcaatggaattctttcaatcataggttcgataacttcctttggcacagctttcatcatatcagtttctgtaatcccaggtgcaacagcattaacacgaatacctttaggtcctagttctcttgctacctccttacttaatttgtagctacattataagcaaaaggtaaattattttctgtgatatcatcacaaaataattgattcattcactgcaaaatataagaaccacctttctgccttggtggttctttgtgtcatatatgaaatttctgaaagtcttaataaagagaaacacaagattgatactattacgtactaaaaaaggacgcaggatctctcccacgtcctcacatttatctggctttatcttcccttaccttcgatacgtccttgttttattttagtatcggtctggattctctctcataaagataaattctgctacagagcggtcatatgttttaatgtgtccaaatagccaatcgattacatttttctgtacaagttcactaaactgttctgttggtccttcataatcctgaaggtattcttgcagttcctgaattgtctttttaaactcttcatgtttttcgtgatgtttttcatactctggataaccagcattttgctgaagcttttcctcttctttgaaatgaaagttagtatactcatccagataatccagcattttgattgcttttagcttgctgtcgccattttgacatgcagttacaaagttctggatacgttcaatcaattctttatgctgtgtatcaattgttttatttcctgttattaaattgtcatcaaaagtaatatttaaatcataagtcataatctggtctccatttcttttttattttctcttggattctttttgtgtctgtcagtttcacatctaaattttctgcttactcttctaaaggaacaaaaacatcttttccaaatccatagattgggcatacccagtgctctggaatatcctcaaatgtaattttgggagcgatatctatttttagattgcctactgctggttcataaatatagccacattgttcacattcatattttttcttttcaatgtttttttcttagttttctatgcttgtattatacatgataattttttttttttcaataacattaatagtcgttatttttggtcattataattaacgcaaatatgcggcaattataatgatacagttatgatataattatttcataataaaaatgtaaaggagagggtcaacatgattacaacaagagaattttttgaacatgatgctgaagacattattaataacattgaaagcatttattcagtgcaaagaaaaaagcaaataaatatctttttgagccatttccaagtaaagatgagcttttagataaatacgaagctggtcttgattctccatacgaggatttatctgatatcgacaatttatctgacgaggaacaatctacaataattactgagcagaaagcacgcatctcaaacgtatataataagattcagaaagagagggaagcatttatgaaaacagtcggctaatgtagtcttgcacattttctttactaatgttattataaaaatgtgagtgggaacgaaatagcactcactatcccttttttttaaatattttatcaaaaactaaacttcccaaaagccagccgtttgcaaacggctggctttttactgtattcatttaataatctgtactacagtttacgtccgcacataggacaatattcaatctctattccgttaatgaacactggcaaactattaatgcctatgttaatctccagtgtattattatctcttcagttggagagaatctgtttggggaaaaattatgaaattttttaaattgttgcagatataccataaaaccccgtacagattttctattatagacaatctatacggggtttattcgtgaaacaatattctatttccaaacttcttctgcaatttcttttacaagtgcaagttttgcccactgctgttcctctgtgatcttatttccaatctcacaggatgcaaatccacactgtggacttaagcatagacgctcaagcggaatatacttttctgcttcgtgaattcttgcgatcaccttatccttatcttccagttccggtttctttgttgtaataagtccaagtacaactttcttgtccggagacacttttgcaagcggtgcaaaaccaccggatctcgcatcatcatactccaaaagtaatgcgtccacatgctcctgggcaaatacatagtcagctacagaatcatatggtccacttgtaaaaaatgtagagtgataatttccgcgacaaatgtgggaagtaatcaccatatcctccggtcttccttccagtgccagattatttactttcaaaagccgtgcctttacctcttcaatatcaacaccaagtgactggtatctctgctttgcagcatctccgacaattgcaccccaggtacagtcatcaagctgcagattacggcatcctgctgaatagaactgtttgatcacatcctgatatgccttaccgatatcctcgatcaattcatcatctgtcgcataaaattttcttgtctgctcaatgttctgcggaacgatcatctgctgatacatctgcgccggtgccggaatggtatactttgcaacggtctgttcatcttcaaactgctttaagaatttgaaatactctacaaacggatgcacctttgcttttacctttcccaccagataagtagcctcaaggtctgccatctctccgttaaactgtacgccgccaccatctttttcatgggtaactccttcaaatccccacataaaatccagatgccagaattttcttctgaattccccatctgtaatcgcatggtatcctgctactttctgctttgcaacgatctctgtcacgcactcatccgtcacgcggtcgagttcttcctgtgtgattgttccttcttcaaacgctttttttgctgctttaagcttttctggtcttaaaaagcttcctacaaaatcatagcgaaatggtgtctttaatgtactcatatattgataacctcctgtgtttttttgttcgttttctagggttatcctaccatgtcactatgactttgtataatacatttcttttgcggttagtcatagtttgaagctatatccagttatgacaaacatatttaaatgtagtactcttgtaattttggaaatttccgaattcaggtacatcgctacctcattttccaggcgtgccccggatgaagcgataagctctatgatattctcccgcacactttttggggcatcaatcagccttttatattatattatggttttgaattttataaacatacttcttcaatgtatttctgcttatattatacttcctcattaaatccacttgtttgatagacctatcagacaaatatttcaaaatatcctctctgagagcatcagacatcttatcaagctggcctggttttcttccactcttcttattgcttgcagcaattccatctttaatagactgggatatataaaggcgctgcttctctcctctgtccagctccactatgatcagaagcttaataatgctttccatagcagttttggttacaatgtcctgttgctctgccgttgtcatcatttgtcgaatgtagtcgctacttaccgttggattatcaagaaataccatgttaatacctctgtcgagccattccatgtatttcttatagccattttctgcttccctggtaaaacgatacaaatccttgaacacaactgtgtctccggcctgcagtaataccaaaggcattgtccaactatgacaaacatcgtagattttccctaacgcaataggcccaatcgcagcaagcaaatacccaacaaattcttttgaaacgattacaagcaaagaaagatacctcttacaccccataacaacagcttgcgcgagaaataaaatccaaatggtaatggcagcacagaaatcaaaaatattataatataggttaaatatacattacaggttctttatcacttcaactctggttaccatgccttcgcgcatactatccactctaagtgcacaatccttataatacacgcaggcacctattgcaaccgtctttccctcttcactcagcttgtcgcttatgacattgcgaagaattcttgtcttttcctccggaattttggctccggttatgagattcgcgtgtgctactgtctggctgccccggcatatcatgtgatcagcctcatcaaaactgcagaacaggaattttctgattgtaaacaatgctgctatcgcgccaattccaacaagagtctcatatacgttgaggtgctcgactatcatctgtctggctgttgcaaaaagcagaacctctattatcgtgcctggctgatgcgtacagagcatctttacaaactccacgcctatagcaagcgacatggcatattccatgtaatactccagttcaagcttgtcatgccatatatcaaaaaaacattgacctacaagctttataataagtatcgctatcacaaatacgagaaatgcagacaataccagttccacgtaggtcgctatgtttttcatggttttcctaaaaaattgtttcatcattcggtcttcctctcagttattgtattattgaatgaattgctcctgggatgctcatatccacaaacagagctatcataaatgatagctctgtttgttttgttagtatctgttttattatgtacacaaactttccatactgatttattattcggtgtactggcaaatatttgcgcttcaggacactcaattcttagaacaggaatgccacactgcatatagaaacaactgcaataagtattataagtaacggtccaccgatttttacgaaatccgaaaacttgtatcctgccggaagtatctgcatatttacagctgttccgaaagatgttgctattgcaaggtttgagcaggcaccgattacgattacccatggaataggactgattccaagcgataatgcaattgctatacagattggtgtaagcattgctgctgttgcgttgtttgacatgatattcgtgagcacacttgtaagcactgcgataactactgtaagaagcacaaccgatgcgttctttcctccgaagaggttgagtacagcgtttgcgattaatgctccaccacctgatacatcaagtcctgttccgattcctgatattgttccgatacatacgaaaacatcccaaggaagatccgaatatgcttttttaatcgagatacagcctgttccaagtaccattgcagcacctataagaccgattgtaccaatgttaaaatagctcttgaaaggctggaaaccacttaatacaaacaatactatgcataaaatcatggttccgagtgccacatagcccttccatgccggagcagctgactcctgttctttctcgagcttatgtatctctgcaactgaatacatatttcccttgtcgaagtcaggactatccggttttaataccttgtcgaggagcttgtagccgattgttccccagaaaataatctgtacaactgctgccggaaacatgatctttgtcatgtcaaacattcccataccttcctcataaccggcatatccctgtaataccgagtttgctgcaagctgtgaggttgagccgattagtgaacacgcacctccgataatggctgctgttccggctgggaaaataaccatttttgaacggatttttccacatgagtttgctgctacgattgcgatgataggcatccagatagcaactgttccgttgttactcataaatgctgacatcaatgaacacacagcacttaccgttactataaaccgcctctccgtcttggcaagaaaagaatttccgattttttctcctatctttcttgctattccggtttcaaaaagtgcggcacttacaacacacattccgactaccatcggccagcctgttgcgctgaatccgctgtatactgcggataaatccatttctggaataaacattgccattgctaccgacccaaggatagcaaccacgcttatcggcagtctattccagacaaacaagcccattgtaattaatacaattataattgaaataatactagaatccatattatatcccccgatatatttttattttaaatctctgcccagtcagcacccttccatttctcgtgctcatatactgacttgtcggctacatatggccactttttaccctctacgactgccagacagcccttgatacacatctgtgccatcttaataaccgcctctcttgtctgggctgctgagtgcggacttacgataagatttctgcagttcaataacggatcatctgtttttggtggctcgctgcagaatacgtctgttcccgcaccggcgataactccgttatttaatgcttctacgagatctgcttcgttgatgattcctccacggctgcagtttattataagtgccgtcggcttcataacagaaagctccttctttgagatcatgttcctggtctgatctgtgagcggtacatggattgataccacatcgctgtcctttaacagctccacataatcttcataatatttagccccatagccttctacctgctcttttgtcataaaaggatcatacgctgcaattctcattccgcagcctttgcagattttggctgtttctcttccgattgctccaagcccaaggattccgactgtctttccctcaagctcgaaagccttctttgctccacggatttcccagtttcctttgcacatctcgttctgtgcctcgataagattctttgacaatgcaaaaatcattgctaccgcatgctcagcaacacttctgttgttggctcccggtgtgatgaccaccgggataccaagctctgttgctttttttacatcaaccgaatcatatcctacgcctgtacgtccaattaccttgagcttcgggctgttttctatagcatttgcatcacattttgcaattcttacaataagagcagctgcatccctcatctcgtcaagataattgttcggatcctgattgtcagctacatatacatcagctattccatctaaaagctgcattccttcatggcatacagcctgtgtcattacaaacttcatattaattcatcctccccagagctagttcattcctttgtcagcattctcttttaatacctttgcaagcgcttccacaccctcatcgcacagatagttgaatggacgtctgcaatcgccaacaggatatccgagcatagcaaccgcttttttaacaactgtgttaggattgccgtatttgaataccgctctgaagcttgcaatagaatcctgtgctgcctctgcctcctcaagcttgccttctttgaaaaggttgtagatggatgaaagaacatgtggataaacatttgagcatcctgctattcctccgactccgccttcttttaacgcaggaagaatgagtgaatcatttcctgataatacatagaacttcttgtcaagttcacgtgtctctgtgatatatgcctttaagttatcccagtcaccgcttgaatccttagcaccgatgataaggtcaacatcctttgcaagcttctttactgtctcaggaagcagcttgtttcctgtacgggcaggaatattgtaaagaacaattggagtatctacatgtttggcaacctctacatagtgatcgtataactccttctgtgacgcaaccgcaaagcttggagtgattattgaaaggacgtcagctccgagcttttctgcctccttgctcatcctgatagtatcctgtgttgaaatgcaacctgatccagcatatacaggtactcttccttttacctgatcaattgcagcttcaaggacttcgcatttttctttttcatttaagatatatccttcaccgtttgttccaaatgggaaaattccgtgcacaccgccatcgataagtctgtcaatctgtgttctgagctcgtcagtgttgatgctctcatctgcgttcattggtgttaaaattggtgtaataattccttttaattctgtctgtttcatgtttttcttctccttttaaacttgtttaattttgtttatttttgatttaatattttgtctgcaatctttaccagtacatctttggttccgaacccacctgatttggatattatctgctgcacaaatccgtgatttttcagattggaaacaaccacaccctgttctatctcacataccggtgtaatctgggtacagcctatcagcttcatataccccatcaaagtatcgccgcctgtcataagtattgtcgtatcctgcctatttgctgccagatggtcagctatgtgtccatgtgccgttggaatcagggttcttacatcattcatagtcagcttatttgcttccataaagccctttttgtcttcttcccggtctatggaatcaatgatgagacatctgtctttttcacattcttcctgcattttgcgcaaaaactccaagcccgcctgcgtgctgtaataatccttctgcaatttttgttctacggtcatatggattcttgaaaatccgtgttcttcggcatagtcaagctgattttgcgtaatcatattcaagctgccacattccacaagaaaattttcactcttcctatagctttgcggcttcactgcatcaaatctgagcttgtcggcaagcgcttccgcaagtgcggcacatccggcaataatacaaagctcatctttttcctgcaattcatcaagcctcgcttctatgtctttgtgtttttccacatcgcagattacgatacgttcatcgctttttatatcattcaaagcttcattccgcttaacacaggcacatttcaaagatgtctgctgtgcgataatatcaggtatgtacgacatctttaccggttcaaacggatcctgcccgaatacacttttttcaagaagctgtccctgtatgtagtgagttccgtttaccgtacagcggtctatcttcggataccccggcagaaaataaactttgtcgtgtctgcttccgtccaaaactgcctgaagctcacttccgatattcccgcggagcgcagagtccgtctttttgaaaataataggaatcttaattgcttttgcccatcctgtaatatttttcacagcatcatatgccttagctgcaggcattggtctggtctcagaatctataaccagaacctctgttgtctcatctatatccccgatagcttccggcatttttgtaaatacctgggtggcaattcccttattcacaaactggattccggtatccaatgcaccggtaaagtcatctgctatgatcaacagctttaccatcgcatttcctcccgctattttttgtttactgcaagctttgtcgcatagtcaattgaatttacaaggcttaactcattcgattcgccttttcctgcaaggtcaaagcctgtaccatggtctaccgatacccttattacaggaattccgagtgttacatttacacctgctacagcatcccatttctttaattctttgttgtatacaaaacctttaaccttcagaggaatatgtccctgatcatggtacattgctacaactatatcataccagcctccgattgccttagagaatatgctgtcaggcggtgtcggttttttctcaggaatattgattccttctgccattgcctcatctattgccggctggatttcctcaatttcctctgttccaaacagtccgttttctccgcagtgtgggttaagacctgccacaccaatctttggattctcaatgcctatcgccttgcaggcatcatttgcaattcttataacttcaaggactctgtccttctttaccttgtcacatgcctgcctgagagaaacatgcgtcgatacgtgtacaaccctcaaatcctcgtgcgcaagcatcattgtgtacttgtctgtatgggtgtactctgcataaatctctgtatgtcccgaataatgatgtcctgccatatttattgcctctttatttaaggcatttgtgacagttgcgtcaatctcgccgctctgcgcaagctctattacctttacgacatactgaaaagcagcctctccacacatctttgatacttttccgaatatgtgtctgtccatgttcacaagattcatgtcgtacacatcaatcgttccgtactcaaactttgcagctttaatatcgttaatcgcatgaatctttatttgtccttcttttcctgcgatttttactgcctcttccatacatgcggcatcaccgataatcaccggacgacactgctcatatatttccgatcttgataacgcttttactgaaatctcagaaccgtttcctgcaggatctcccattgtaattccgataattggctttttcataggcccctcctttattttaataccttaagatatatgtttctgatatcgtcaaggcttaattctttcatattgtttacaagaagtctctgctgtttgcttccggcatcaacaaggaaatccaggtcctccggcttaacaccgaattcctttaaatctgttggaatgtttgtaacctttacaatgtcagcaatctgatcgatcatgtactgtgctttctcatcctcagattttcctgcaagctcagggtaaacagcatcgcaaagtattgcaagtctcttgctgcatgcgtccttgttaaattccataacatgtgcaaaaagtatggcatttgatacaccgtgagcaatgtgatatttgcctcccagtggatatgaaagcgcatgaactgctgttgttccacttcctgtaattgcaactccgccatagaaggctccggtcatcatattgctttttgcttccatattgtccggattgttataagcttccctgatattgtggaaaataagcttggctccggctgctgcataggtatcggaaaacggtgttgctttctttgaggtgaagcactcaaccacatgggccaatgcatctacacctgttgctgccacaattgattttggaagctttctgatcatattcgaatccaataccacatagtccggaatcatactgtcatttacaattcctttctttgactgttcctccggaaccgcaacgattgcattgcaggttgcctcagatcctgttccgcatgttgtcggaatcataaccgtcttaatctgtttctttgcaagcatcggatcattgagcaaatcttttatagtatagtctgcatcttttaatacgcagcaaagctttgccgcatccataacgcttcccccaccgattgctatgataagatcacctgatgtgttctccacctccttcataaccttttcaacatcctgatatgatggttcacaagcaagatcatcaaatacctgatactctgtcttgttttcctcaagaatgtctgtcagcagatctaaaagtcctgttgagcgaatgcctttatcagtaaaaattattactttttttgcattctctttttctattaccgctttcacattctcaatgcttcctgctccgccaaagatacatgacggaattttaatctgataactcatatattacctctcctttgttatattgttattcttgtgttttatttttgaacatctctttgaactaatcatataatatctgttttttgagccacgttcaacgcgttgttttgttatttttgttctatttcgaaacataagccgcatttatttgttgcattttgaaacattctgtaatacaatatggttgaatagtaacaaagcatcactatcgctatctttacgtttcatttttaaacattaaaataaccacttaacatttacaaatcccataaggagaaatatatgcagaaaaccaagattcttgcagtcgccccttacgagggcatggctgacatacttaccgatatagcacagtcgcgcgatgacattgctcttacggtccagaccggcgatctgttcaccggccgtgatatagcaatgcagcttgcacataaaaattacgatgttatcatttcgcgaggtggcactgcagagcttatacaatctgctgttgagcttcccgtcatagatatatccatctctgtttacgatatacttctgagcatcaagcttgccgagagctacaacggaaaatttgtaattgccggttttcccggaatcactgcaaatgcacatctgctgtgcgacctgcttcaatatgatattgacataatcactttcaaggactcggcagatgcagtcaatcaccttaaaaaagcaaaagaaaacggctgcacacttgtcctatgtgacgtgaccggtgccagagccgcaaaggatatcggattaaattataatcttgtaacctctggcagggaaagcatagaaaacgccgttgccgaggctgtaaagcttgtgcactcttccaattatgtccacaagcagaaggatctgttccagtcgcttctgaccgaggatgaccgcgaattcttaatttactcgcctgcaggtactctgtggttttcaagcatcgcaatagatgaaatgaatacatcgttgatgaattttgtacagacatacattaagtcatttttgaaagttccgaaccagaccgtttcgcatcagatacgcgataacgtctatactctgtacaaccgccacctgatttacgaggaccagaagtacactgcaattactatatgtaagagtcctgcattaaccgccgaggacgaccctggatttcagatttacaatattgacaacacctcctccaacgactttgctgacgcttacaacggaaccggtaaagcaggcaaaatagcgcagatagtagaagaatacgctaaaagccatctgcctgtgcttattctcggagaaaacggaaccggcaaaggcaaggctgcatcgcttatttacaagcaaagcaactataagcacgctccattttacagtatcgactgttctctgataaaagagcgtaagtggcacagcctgctaaacaatgagaattctcctctcaacgaagtggacagcacagtattttttgaaaaagccgatgcccttagtctggaacagattggtgatttgtttcaatatatagaccagacgaagctttgcacgagaatgagactcatagtctcgctttccaccaacaactccaatcagcctgcatttgccacaatacgcaccttcatggagaaccatctttcctgccttaccctgaatctcccaccgcttcgagagcgcattgacgatttttccggtataaccgcgctctatctgcaccggttcaatgtctccctcgggaaacagataataggctttgatgttgaagcaatggaaaaaatgctctcgtacaactggcctaacaatctcgaccagctgcagcatgtccttaaagagcttgtcacaataacaaagacaccgtatatctcctgtgacactgtagaagccatcctgaaacaggagcccgactacggacgcgtctttgatgattcagtaaaatttgatggaactctagatgagataaattatcaaatcattcttcaggtgttacacgaagaacatgacaataaagaaaaaaccgccaggcggctcggcataagccgaagcacactctggcggatcttgaagaacaataattaatgtttaatcaatttctccctgtgggataaaaacctgaacatcagcattctcgtcaagctctataaatactcttgtatctttgccgaccagtcccttaaaatgtccggtgaatttctctccggactgggttgttccggtaacatccattttgtatacgcttccggcatctgatgagaaatcaattgaatcatggctgccaagtgtgttgacagtctgctctttgccatcgttccaggttaccttgatattcttaacattaaaataagtctggtttataagccggatagttgttgtctcttttccgtcctgcgctgcataaatacaattagtacctattaacactcctgccatgatagtaactaatgcaaacgtagcaagaacttgtttttttattattttattcatttctgaatacctccttataatggcactccattatcttcgcggatattttatcacaagatatattaattaaacaattgtcaattagttcaaaacttttttattattttatgtttttttgacacttttttcaaagtattggacattttgtttaatcctacaagatctctaatgctttaaaacactaagtttatcgcaggtgagcttttcctcagactttcccttgtattataatttcccatagtgttttatgaactctgttaaggaaaaaatgagggtaattaagagcaataccaatgtgcaaaatacacaaaaaagttcttttatatgagcgtatttagataaaaatggatgattttaagaaacgggagaaactgttatgggattgttatatgcaatattttcaatttttatcacgctaattttcccaaagcaaattacggatgtgatttgttatggaagacatcgtgatagggaaaatataaagagtaaaaaaatatattgtcttatatatgttttttggacattattttttggtttgttttgtcttatgataggttcggcatcaggagtaaataatacatttgatagagtttcggattattatggattgaattttggcgaatatgattattttgaggcggcatccatatatgacgagcatgattataaacatgaaggtgatttcactcttgtatactatatcagaaaaaatgaagataatttagatgatttaattaaacaaattgttcaagaaaataattctatatacaaaagatatcagctcaatgaaattgacgtggtatatgaaacgaacggtatttattacatatgtgaaaaggggaggtgattgcaaaggtagtagtagaaaacgatggattgttaaaaaaataagttattaatggagtagagaaaaaattagaacaaaattcaatggacagcttgcgactcctttactccagccatcggaattattacggtcaaaatatgcttccgctctcttcagatcaaataggatctctgtcttctttccctgtgacattcttaagttcagcttaatcttgtctgcagttgattttttcagatttatccgcatttccgtttcataaacacagccactccgaagttcttttttctcgtcttcttttatcagaatgtccgcttcttcctgctaattcttccggagatcctgtaattcttttacaggaataaactttaatgtattatcttctgctaatactgcctctctcggaatgttatagaatccgcaccagcattcttgatatgtcggaccccagtctttccaaaatggcatccaatcccatgcattcgcccatcctaccagataaacactggtacgctcttttcctcccatcggagagaacatcaacacattattataacagaacatttacacaagctctagtttcatttttcgctttgttatatctttatgtatctttaaacgcccaaattagaaatattactcttcttcactcttcttcaacttcgaataataactatccgcagtataaagcgccgccaccggattatgccccaatacacggtctttcgtcactgctgtcgtagtcagtgcctcggaatatttgtaaaacagactgtcatgccccacacaaagtccgaccacaacattcaggtccgttttcgccttgttcagaagctttgcctgcaggatcggattacacatatttacaccgacaccttcgcagcattccgggatgccgacagatgtcttcttctgtgttccggctttacaggcgacaccatatacctcaaagccatgtctgcgcaggatatctgccaggatacggctttctttcaacaatccgacacaggttgcgatcccgatctttttcgcattaatcttctttgcaaaatccatgatttcttcgacacgggtatgtttgcagtaattctcatactctacttcagctgcagcgattgttactttgcggttctcgtcttcattgtagcattccatagcttcatttagaacttcttcatccatgtgtgttgtcagacagaaatccggataggttttatccattttgttgcagttttttactgcgcagtcgatacaggacatgtcttcttttttcattttttcattctccttttgtatacattggtatctacagaggcctgccactggcagattctctagattaagctttactttgtaaaatatcctctatttacttcataataacaaatacttatactacagacaatggttttccgtttttattttcttattttttgtagttcttttctatgagaaacgttccccgattcagggttgatttgtcatgaattgtcgattctgatttttgaaaaattattgaaaattatctttttaaacttgaagatatataacagtctctctgatagaccatcatctttggatttatactatcatgtataggttatttcgtcaatcaaaacatttatccacttccctcatttcaatcccagctctttcaatacctcagccgaataccagctttttcacaccaaaaagttcgtatacaaaaaagaatgccgtaaatacacaaaaaccagttcgtaaaattcatatttgttagattcataaaacactattttccataattgtatcataatcacataatccggaaaagtaattatttttttctttgccaatccttttactatcttatcaaaatcagattctatcggctgtgtcttgttaaaaatcccacaaatctaacagtctttcattattaggaccgtgacagtcatatgcattaccataggtacgaatatacttattcttcattcccggaaagtatttgtccaaggcatgataaaaaatactctctatcgccctcacgcatggtatcccccatactaaagcagatgatgccttttatgcctgcatggacacaataatcgagaatccccttgatattctcctcagtattttggtgctttctttatagattccgtccctgatactgtattgttactacataaacgattttgcgtggttcgtcaatgcgaaaaatagccatgtagttatcaattattaactgtccgtagccttttccggcatatctgccttcgtttcgttcttggtgggattgaggaaaggtatctaagcttaaaatggcttttttaattcgggcatcttgtcctttggcattttcaggagacaatttatccaaaatgttttttctccaattctgcaaaaactatttctgcatcaacggcttctgctccgttagcgatttcctgctcggattcgaagattgcttggtcgatgcgattcattcttgcaaatttatcatacagttcactgctcattacaaccaagtctctatatccgtttttggtaataaaaattggctcctgttccttatgtgcaatattggaaatctcggttgtattgcgtaaatccttaataggcataataagtgacatgatacttcactcctttcattgacataattatagcataattatgtcaataaaaagcaaccgcgaaatgcatatcttcacaaaataatatatggacaaaattgaaaaacttattacaaaaaattaaaaataatggttgacagatacaccactatcgtgtattatataacacgtgccaagcataagagggcacacaacttaatacatgcgatagtggcgtagttggtaacgcgcgaccttgccaaggtcgagaccgcgggttcgagccccgtctatcgctcttataacgaaaagagatatccttcatggatatctctttttcattatagtagtgcagcagagcctctcacccgcggtacagcttcttgtctccgttccacgtctacacttcgtttcaaaaccggaatccaccggaagccgtgaaacggtcggcgcagaacaatttatcaatacaaccgttttatctggtatcgtcaaacttttttaaaaaaatttaaaattactgttgacagatgctccactatcgtgtattatataacacgtgctcgacacaagagagctcacaaacataacaaatgcgatagtggcgtagttggtaacgcgcgaccttgccaaggtcgagaccgcgggttcgagccccgtctatcgctcttataacataaaagagatatccttcatggatatctctttttcgttataggcaggaatatctgtcatatttttgcgtccccacacatattatatataaaacaaccacaggaggcgcatatgagtgcaaaaacaaaaatcgtcgttgtaaaaatgaagcatgtcattctcaccggagtgctccttggcatactgcttcttctgataattttcgctgctacatatttcttttcaggtgatgagccaaagcctgcagtcgaagaaaccggcatgtatacaccgggtgtgtacaatacatctgtagcgctgggtggggcggctatcgatgtgtctgtggcggtggacagtaataacattaactccataagccttgaaaacatgactgattcggtggaaaccatgtatccgcttgttgagcctgctatgaacgagctcgtatcgcagattgtgcaaaatcaatccaccgataatatttcctacgcaaacacaagtcagtacacctccaaagtgctgctcgacgcaattgataacacactctccaaagcaaaaaactctgacagctcaaataccgaagaaaatgcaaagactgtatctgaatcacaaaaagagcccggggattcttcaaaaactgaaaatacctcgcagtaacctgcgaggtattttaacttaatcatataaatcgtaaaatatatgttatgtatcaaaaatataatctactgctcactgtctgcagataatccctgtagataatcgctgacagcactgatatctgcgtaatagcagttcaccggacgactcttctcataatactgatatccggagtaaccgccccagcctaccaatgcgactacagccgcagctgcaacaattcgtgctataacacgctttactttatttctggcatttgtctttttacgattcgccttttcattcttatatttatcaacctttgcctgactcattgcttttctcctttaactcaatgcaataattctactacattttgcgggagatatcaaggcatttcatcatagcttcaaaaacactgcttctcatgcccttttcctcaagcacacgcacagcctggatagtggttccggcaggtgagcacaccatatccttgagctcgcccggatgctttcctgtctcgagaaccatttttgcgcttccaagcactgcctgggctgcaaatgtatatgcctgactccttggcatgccgcctgctacagctgcatctgccatagcctcgataaacataaacacatatgccggtgaacttccgctgacagctgtcactacatccataagcttctcgtctatcatctcagcctttgaaaagcccgagcacaaatcaagcactgtatcaagctccgcctgcgatactctttcatttgcacagactcccatcatgccctcaccaaccatggcaggtgtatttggcatggtacgtataacctttaagctctttccaaacatctcgtcaaaccacgaaagtgacttgcccggtgcaatcgaaacaatgatttcatcgtcactaacagtgtcctttatctctgctataacctcctcatagtactgtggctttactgctaaaaacaaaatgtctgcaaactctgctacgctcttattgtccgctgtcagcctgattccaagctctgctgcattcttttctctggagctttcggtctttgcagatgcaagaatatcgcttgcctgtgccttgcctgatgcaagcactccgtgtatcattgcctttcccatgtttccacaacctatgaagcctaatttcttactcatattatcctcctgccgtaatcaatatatctgactattcaaagcatccaaaatcatgtttaacagtcagtatttttgcaaactattttagcacacttcattcaatcatgcaaaatatcttttgactctcatatcatcttatgcatcaaaacctgaatgtacaggcaggcctctgtgctcaacaggagtggaaaaaactatctgtgtacttgtcttgccgaatttctgcagagtgttgataaagtcatcaagctcctccgtattcaaaaactccacctctatgagcatagaatactctcctgtcacacaattgcactctatgacattctccacactctcaataaacggataaaactcttccttttgtacaggctccaggtccagattgacaaaggcctttatcttatagcccagattaaccgaatctacagcggcatgatagccctttatgattcccttgctctccaatctctctattctggctgttacagccggtgatgacaaaaacacctgtgccgctatctcctttatcgctatacgtgcattttcctgcagcagctctactattttctcatcaatcatatccaatgcattcttagtcaatgtaccgcctcctaatctctcttttgtaaatgtgatttttccaacaaaaaagagggcgcagataacctaatatctgaacgccctcgttcgctttacttttttaattaattactctaaaaaaataatatcattaatcaatattacttgtcaagattaagatctgtaatctccgttaatttttacataatcatatgtaagatcacagccccatgccttggctgacacatctccctggtgtaaatctatgtcgatgtaaatctcatcctcatgcagtatctttgctgcctcctcctctgagaagtcaactccggcaccgttctcgcacaccttgatgcttcctgctgttgagcgcaggtgaagctccaccttgtctatatcaaaatcagcctccgcatagcctatagcacaaagaattcgtccccagttggcatcctcgccaaacatagcacactttaaaagtggtgaacggataacgctctttgccacaataattgctgtatcaagatcaggcgcacctgcgcatgtgcactctaacagctttgaagcgccctctccatcctttgcaagcattcttgtaagatttgaaagcacctcgtacagtgcatccttaaagatctgataatcatcattctctgtagtaataggtgtgtttcctgcaaggccgtttgccatgatgcttaccatatcattggtagaggtatcgccgtcaatgcttaagcagttgtaggtaacctttacaatctcgctcagggccttctggatgagctccgatgagatagcaacatctgatgtgataaagtttaaggtagtagccatgttcggatgaatcatgccgcttccctttgccataccgcctactgtacactcactgtctccaagcatgaactttaccgcatactgctttggaacggtatctgtagtcatgatagcgtttacagccttgtcattgccgtctgccgaaagtccctttgcaagctcctttatatggctctcgataggctcaataggaagcacctggccaataactcctgtagatgccacgataacctcgtttggatcaatcgaaagctctgctgctgcaagctcgcacattctctgggccttctctactccgtcagcattgcaggtgttggcgtttttgctgttggcaataacagcctttgccgtatgtcctgatgcctcaaggtgtgcctttgtcacctgaataggagcgcccttcaccttgtttgttgtgtaaacagccgctgcctgacactgtgtttctgaataaactaaagccaggtcatttttgtttttgtcactgtttaatccacagtttaatccgtttgcaacaaagccctttgctgcacagacgcccttttttacctttgtaaaactcatttgtataatacctcgattcttttaatatgtccaatccccaacatatcgtattattgatatatgaacgatagactgtaacatcctctcgttactctatctctttcatgacgctcttgtaagccggacggataatcttgttcatgccgacaatctcctcaagcctgtgggcactccagccaacgattcgcgcaatggcaaaaagaggtgtgtaaagctccataggaataccaagcatctcataaacaaagccgctgtagaaatcgacattcggagaaacacccttaaagatatggcgcttttcagcgataatctcaggagccaccttctctattgtattatagaggttcatctcattatctctcttctttgcaactgaaagcttctccacatagcctctgaatatacgctccctcgggtcagaaagtgaatacaccgcatgtcccattccatagatgagtcccttgtggtcaaacacctcaccatccatcatttttctgagatatgctctcacctcatcctcatcatcccagtgcttcacatgcgaacggatgtcccgcatcatctccatcaccttgatattggcaccgccgtgctttggtcccttaagggatgacatggctgccgcgatagcagagtatgtatctgtacctgccgatgtaaccacacgggtggtaaatgtagagttgtttccaccgccatgctccatatgaagaataagtgccatatcaagcacccttgcttcaagctctgtatattgattgtcagctctgagcatcctaaggaagttttcagctgtcgaaagctttggatccggcctgtgaatatacatgctctgatcattttcataatgattatacgcatgataaccgtaaactgcaagcatcgggaatattgcaacaagtgataagcactgtctgatattgttgtcgatgcccgcctttgctacaagaggatcatatgaagccagtgtcagtatacttctcgtcatggaattcatgatatcctttgacggagccttcatgatgacatccctcgtaaaattggtaggaagggttctgcttcttcctaaaacctctgtaaactcagccaattcactctcagatggcagctgcccgaaaagcagcagataagcaattttttcaaaaccaaactcaccgggccttaagttgttcgtaagtgtctttacattgtagcccctgtaccacaattgtccgtcacatggcacgctgctgccatcctcgcccgtcttaaatgaaacaatctccgaaatattcgtaagacctgtcagaactccctttccgtttacatccctaagtcctctgttgacaccatattccctgaaaagactatctgaaattgtgtcatttttaatacagatatcctgtttttttgcagcgtaatccgctaataaattattgctttttgtcatccattcacccttcctttttatcttttagaatatattatatccgttttcttagaaattggcaaacccattcatgaatccgtagccaaaaattttatttgggtagtcagttttttcttttctgcggcagtttcttaccatgacattttttatatccactccgtttgcgagcaaaacattgcctctcactatcatccactccatgatgagagccgccaccgctgcagtgattgcagcagccgccgatgtgccacttagtgctatatacattcctcttagatttgcccctgtgatatccacagccggtgctacgagatccggctttattccaccgtctgcgtcaaagccccttcccgactctaaaagtattgcatcatttagggaattatagcctcccgccgttatcacaagcttagcatccgaaggcatggtcagcgtggtatcaggctccgaaacaataaaactcacatcagtatcaagaagtcctgtcatcgggagccacatattaaaaacgcctccaatagtactaagtggaaataccctgatggtccacactcccttcaccaccttttcaaagcggataaatataagcaaatccctcgtctgtctgccggtctgcctgtagtcaatagtcacctgtgttccttcaagcagaaatgagtattcaccgctgtctattcgcattggtaccccggctggatttgattgtccgctaggcgatatgacagaaagcgtaaatagctcaggtgaaagtgcccagcattccagataaaagccatccatatcctgctcaacatttatctcaatatcatcgactgtatctgttatacgccctttataatgatgcctgctgttcgcctcattgcccgctgccgcaaccacagccctgcctctttttgccgtgatatagtccagatactctgaaagatcctcagctcccgtgtggcttccgttattgcagccaagcgccatgcaaaagacagccggtgctcccttttgacctgcaaactcatctgcaaaatgcactgctctcatcacatcaacctccgagtacaccattttacgatccggaataaagtagaaatcatacagcttttgaggtgcccttttcagcttcacgacaataagcttagcctgtggtgccacacctgcaaaatcatcctgcggtctgtcattgccacatatcacgctcgccacaaacgtaccatgcccatcctcatcgcccggtatgctctcatatggattttccgataaaatagcagcatttatctcatcctcagaataaaccgtatccgtattctgatcccagagcactgcaatcttcgtcttaccctcaggtgtcataaaagcctcctgcgcataattcacacctgtgtcaataaccaccacatacacaccatttccgtatagtcccggaacaaactccctttgaagcctgaaaacaccgctctttacaagtccctgcgtggataaaggagcaagacactttggaatagccgaatacgaataaactcccaccagaagtggtgggagtctttcgtaatcctcatatgtccatatctcgtaatcatcgcccaatgtctctatgatatcaggagctattaccggtggaatgaactccttttttgatactatgaactgcatattttacctcatatgatataatatttaaatatgagggtcaaaagatattttgaccctcatataattatattctataaataaaaatatgctaccatatttatcaattaatataaacaaagcttcgaccaaaatttactcgcggcttccatgacatgtaaaataaatcacctggtaatcctgcgaaagcaccgcaagcagccttctgcctcgagcaagcttctcatcatccagattcacaaacggatcgtcaagtatgaggaacggcttctcgcccggatacatcgcatccacaagcgcaaaacgcatacatatgcctatcaggtccttgtagcctgccgacatggttctcacatcgcgaagctgcccctgctccttcatccttattgaaatattggcatccacctgccagtctctgtctgtattttctgtcaggataccgaagtacttctggaagccattggaaataggcgccatgtatctggcagtaaactgctcccttgccctggtcagatagtctgatgtaagcccaagtatctcgtacttatgcttttcctcagcctgtatctgcttacagttgcgatactcctgctccttttcatccctcatatcaagctgctcctgcagatcatccatctgtctgccgtactgcactaaagatgccctgatttcatcgaggctgccttccacctttgaaatcatctcattgagctcatcaagtgtatacggacactcatttggtgcaagaagcttgtccatatcgttgtcattctcaaactgcgttttcttctgaagagcactgtccatattttcctttgcaaagccggcctctgcgagctgctttttcatctgtgaaagtgtctgtgtatattctgcagcactgtcatatccatagagacttaaatactcatcaagcgaagcctttgccttctcatagtcagcctttgtcttggcgcgctttcctatctgctcgttgaaacgactgtagtcatgagcctttgttcgaagctcataaagcttctcctgatactgcgattcatctgcttcaatcgaaaagctgtcaaaaaactgcgatacctcatgctccattgatgtaatgccgctttgaatctgctcaagctgctcctttaattcctgaatcggtatctccttctgctttatattttcctcacgctcagccataagcctgatgtatgctctctgctttttgttgttcagacggattccatagaccatcatgacaacaccgcaaagcgccatagcgactccagctatgcctaccacaagaaacatgatttccttcacattgtacttctcattcagactgaataccgtggcaacagccgctgccaaaagaccgataaccataagcacaatacctacaggtacaagcttagtcttctcaggggtctccggctcctcctcatcatctgccatctttgcaagtgaggtcatctgcgagagcttgagctccatatggctgtactcattcttgacgctctggatgtttgctatcttcttttgcatctcatcaagaccatcatcagatggcacaccatccttaaacatacctgaaagtgtatctaaatactgctcctcctcaggcgtaaagctcagattatcttctacagcctttaagctttctagctctccggcctgctttgtcttttccaaaagctctgcctcatccggtgctttttctccaaagactgccattgctgcattgtaaatgctctctttctcctttgcaacagcacaaagctgctcgtagttttcacgaagtgcctgctttctgctgtcctcagatgccacctgaagcgccctgccgtactcggctctgataccggtaagctccttcttctgggcagttttctcatctattttctctgaaagctgtgctgccgcctcatccgctgcctgatacttcttaagctcctgttccaaggctgtgagtgtatttacacgctttttgatagagcctgtgatacggtttggggacatcttgttcatcatgtccttaatgtccgctgtcgccgactcgaagttgttgatgtcatttgtattttccgccatattgccaagctttgcgctgatgctgtctgatgacgaaaacatgcagtctgcctgcgctatgtatatcgttctcttgaacgagctgcggtcgaggtcaaaaagctcctctccaagcagtggtgaaaaatcatcacactcaaccatggttgcaagcctgtacaaatgaaaatcatcctgcttttctgtgaggccaaatgtccttacaagtctgtactccactccatcggcctcaaaatcaagctctccaccataagtgccgccctgccatggcttatagagctttctttccctctcaaaggcgcccggctcctttttcgtatcaaagccgtaaagcatagccttcaaaaaagccgcaagtgtactctttccccagccgtttggctggtttatgacattgactccatcattgaaattgatattaagatcggacagctttccgaagttgtttatgtgacaagctattaatttcaatttctaaatctcctccccgctaagcgccgatataccacacctgatgacctcagacttctgctcctcggtcatatctgagccaagcaccatccgtatgaactcacccttaagtgatgcatccttttcgtattcactgtaattgatgagaagtcttgtctcatcatacaccttttcatagtagaaatattcctcgaacatatccttgaggaagtctgtgtttatctcacaatccacgtccacctcacctacaagcacgaactttaccatgcttctcgatgaatattcactgtccgaaatggccttttccatcttcacagccacatcctgtgtggtcatggctcctgtcacatccacatacagcgtgtagaggctcctgtacgcaaacggtacaaagctaaagcctgccgtgagcttctcatcatctatatcaagcaccacaaagcccttttgtccacactcatcaaagcctcttccctctaagcagccgctgtagcagtacatgccgcggttgtcaagctgtccgctctgatactcatgcacatgaccgagcgcaagataatcaatgcccttattcttaaggtcgcctgtggaaatctcatcaccgagctgtccgtggagagtgacaacgttgtaattgtcattgtcgagcacaagagaattgtacataacagcctgattagacttgtctatctcaagacctgttattgtgatattcccatagctgtatgaggtccactgattagaaaaaagcttaagattttcagggatttcatcgagcttcgatatgaaattgtccgagtcgtgattacccttaagataatagaaatcaatatccggatttgacgtaatcgaatcctttaccagatttctggcagtcgctgacacatttctcgtgtcaaataaatcgcctgctatgataatcgcctttacgtcgttatttttggcgtactctatcatccttgaatatgtacgcagtatttccatttttctctcttttgcctgctcctttgacagattcgaggtcatcttcgaatccagatgcaggtctgcacagtggataattttcatttttccaattcctcttgatatatgaacgtttataaatcattacagactacacatagattcattacgcatagcctggttgcatcatttacagccaattcacaatttcataatcatttaacaattaaacgtgctgactgtctgcaagctcaggtgtacctctcatctgaatgagcgggccacccttcttctccacatagtccttagtgattgtaaccgtgccgatattgtcatcctttggtatctcatacatgatatcgagcatgaaatcctctataatcgcacgaagagctctggctccgaccttcttttcctttgccatcttggcgatggcatagagtgcatcatcgtcgaactcaagccttacctcatccatctcaaggagcttctgatactgcttgataatggcattctttggctccttcaatatctttacaagcatatcctcggtgagcgcctcaagtgagaacatgataggaagtcttccgataaactcaggaatcattccgaatttgcggatatcatcaacagttgcctgcatgagcaggttctcatccccatcatacttgtcctttaaatcagccttgaagcctatagaagcctccttgttcaggcgctcctttatgatatcctcaagtcccgggaaagcacctccgcatataaaaagaatatttctcgtgtcaactgtggtcatcggaaccatggcattcttgctgctggcaccaaccggcacctcaacctctgagccctctaaaagcttaagcataccctgctgcacggactctccgctcacatcacgctggttggcatttctcttctttgcaagcttgtctatctcatctataaaaatgataccgtgctcagctctctccacgtcattatctgcagccgcaagaagcttacttaccacactttcgatatcgtcaccgatatatccggcctcagtaagtgatgtggcatctgttatggcaagtggcacatctaaaagctttgcaagagtctttacgagatatgtctttcctgaacctgtaggtccgatcatgagcatatttgatttctcaatctccacaccatcatatttatttgaagctttctttgcagtggtattctcttcctgcgccttatgcttattgtcagccatgacacgcttgtagtggttatatactgcaaccgacatgaccttctttgcatgctcctgacctaccacataatcatcaagactcgccttaatcctatgcggtgcaggaattgagtgaatgtcaagaatcggctcgacctttttctcttcctttggctttttcttcttaagcttctggctgtttggtatgcctcctgtcagatctgacaaatttatcatgctgatattgggcatattgccaaaatccatattgcttatatttcccagatttccgaggttgccaaaattaccgttgctcatggaatcaaaggtcttttgcatacaatcgttgcaaatgcacaggttcggctggatatgtatcatcttgcctgccacgctctccggtctgcggcagatgtagcagacatcctcatagtcgtttgccttgttatcgtttgtattatttatgttatttgtagtttcttcattattatcctgaatattgtcaggtacttccttgaaatcatcattattcataggtgaattaccgcctttgtatcatttggctgctttatcagccatttaactattatacactactgaataaatgcgtgcaagcaagctgaggcgcttttgaaaaaaaagaaccgacagatcaaaagacctgccggatccattttcttaatatctatccaattataacagctccataagaagcttattgacaacagcaggatttgccttgccctttgtggccttcatggtctgacctacaagtgctccgatggctttcttcttgccattgtgataatcctccacagcctgtggatttgcatcgattacagcctggattgtggctttaagctcaccctcatcattcatgctcttaagaccgttctcctcgacatactgctcagggtcgatatcctcccggaatattttctcaaatacttcctttgcaacagatgagttgatcgtgcctgcatctaccagatctacaagctttgcaaggtttacaggtgagaattttatctcatctgcatccatatcattatcctttaacagtcgcattgtctcaaccatcagccagtttgaaaccttcttcggcttgccgcagagctttgtggcagcctcaaatatgtctgccatatgctttgactctgtgagaatctttgcatcatactcagggatgtcgtattccttcttgtagcgtgcaagcttctgtggacgaagctcaggctgctttgcctttatctgtgcaatccattcatcggatacgacgattggcacgaggtcaggctcagggaaatatctgtagtcctgtgcatcctcttttgaacgcatggcatgtgatgattccttgttgtcatcccatctacgtgtctcctgtactacatttctgcccatctcaagaagctctatctggcgctcacgctcgccctcgatggcatgtgcgatagccttgaaggagttaaggtttttcatctccgtacgtgtaccaaacttctttgcgcccacctctctgactgagatgttgacatcggcacgcattgagccctcattcaatttacagtcagatgctccgagatactggatggtctgacgcagagtctcaaggtatgcgataacctcctcagcggagcgcatatcaggctctgatactatctctataagaggtactccggaacggttgtaatctacgatcgatacgtcctcccactcgtcatgtacgagctttccggcatcctcctccatgtggatttcatggattctgacgtttttctttccgtttgctgtctcaatctccactgaaccgttgcggcagattggcagataaagctgtgatatctgatagttctgtgggttatccggataaaaatagttctttctgtcaaatttgctgtactgtgtgatggtacagttggtggcaagtcctactgccactgcgtactctacaacctgcttgtttaaaaccggaagtgagcccggctgtcctgtgcagacaggacatgtatgtgtatttggtgcgcctccgaaagctgtggagcaggcgcaaaagatctttgtttttgtagctaactctacatggacctcaagtccgatgactgtctcatagtttttcatatcctttttgcctccttcctactgtgcaccggcagatttattggtatctgctgtatttttgttactgtattcctccgcgatagtgctgtgcttaagctctcttgttttttcaaagctgtatgctgcgcggatgatattcttctccttaaagcagtctccgatgagctgtaatccgattggaagtccgtttttgtccatgccgcacggaagcgatattcctggaagacctgcaaggtttacagatatggtgtagatatcaccgaggtacatctggattggatcacttaagctctctccaagctttggagctgtggttggtgctgccggtccgagtatcacatcatatttggcaaaggcatcatcaaaggcttttttgataagtgcttttactcttaaggcctttaagtaatatgcatcataatatcctgatgaaagcacgaaagcgccgagcatgattcttctctttacctcaggtccaaagccctcagaacgcgatttcttgtacatattgtgaaggtctgtgtactcctttgtacggtatccgtatttgacaccgtcgaatctggcaaggtttgagcttgcctcagcacaggcgattacatagtaagccgggatggcatactctacaagtccgaggtcaaattcctccacaacagcaccttttttctttaattcatctgccgctgcaaggattgccgatttcacctccgggtcaagtccatctccgagataatcctttggaataccaatcttcataccctttacgtcatcaacaagcgcctctgtaaactttaaatcgtctctgtttactgatgtcgaatccttcgtatcatatgaagcgattgcctcaagtatagtagcacagtctgtgacatcctttgcgataggtccaatctggtcaagcgatgagccataggcaatgagtccatatcgtgaaactgtgccgtaggttggcttgattcctgtcacaccacagaaggagcttggctgtctgattgatccgcctgtatctgaaccgagtgcaaacggtacctcctctgctgcaactgctgcacaacttccgcctgatgaaccgcccggtacgtgctctgtattccatggatttttggttgctccaaaggcagatgtctctgttgtgcttcccatggcaaactcatccatgttggtttttcccacgatgacacagcctgcatcctcaaggcgcttaacagcctccgctgtgtaggtcgggatgaaattgtagagtatctttgatgaacatgtggtgagaagcccttctgtacacatgttatcctttatggctacaggcacacccgcaagcgctccttttagctctcccgcatcaatttttgcctgaacctctgctgcttttttaagtgcaccctcttcgtctattgtgacaaagctgtttatcttttcttcttttgcttttatagaagcaatggcagcctttacagcctcttccactgtaacttcctttgcctgtattttcttgccgagttccacggcagttaaagacattaaatccatttttctcctccttgccgttattcgccgattgtctttggtaccttgaatccgccgtccttcttgaccggtgcattggcaagtgtagcttcacttccgtcaccgtttgtgacaacatcatctctgaatacattgtttacagggaatacatggctcattggctcaattcccgaagtatcaagctcctcgagcttgtcgatataatcaagcatatctgccatatccttcttggcagcctctgcctcctccggtgaaagctcaagctttgcaaggattccgacatactccatagtctcgtcagagattacgtttctcatgactccgtcctcgcccatcacctttgtggtaacagcctgctgctcaggagtctcctcctcaggttccttgtcaagtgctgcacttctgacctttgcatataccgcttcatcgcatataccctgattgttgaagcccgcatggcggagagtaccctcataatccatgcctgccgcagccataaccttgccggaatttggattttcagtatcatgtctggcccatacacgtccggcaccgacctcattgatgaaaaatctgatgatagcagtcaccgcctcagtcatatatcctttattaaaaaactgacttcctaagcaatatccaagctcaatgctctccgtcttttcatcaatgctcacaaccgaaatattgccgataggctgctcaagatcattaagctcaatagcccaattgtaatactctatattgtcatactgtgcaatccagctctttatcatatcctctgcctcatcaacactcttgtaaacaggccatgtaagatacttaactgtctgctcatcagaaaaccagttgtaaaaaacattttccgcatcttctatttcaaatcttcgaagagtaagccgctctgtggcgatttctcttgttcctatatgattcatacgatatcctttctctctttcctgatatttaaatttattcttagaatataccaatatctgccccggggtgcgctaaacaccctgcaaagcatgggtgtatatatattgcgaagacaaatttttaacagttccgacgctcacagcctgtaatacctcacagcatacctcctgccaataacctatccgcaggaaatgtcggaacaagcttaaaaattttctgagcaaaatatatacacacatgccaccacacagcctgcatgcgcaccctccacaaccccagaagctgtgacctatggctccaatctgctgagatcacgaggaaacagtgttgcctcacgcacattgtcctctccgataagctgcattgtaagtctctcaagtcctattccaagacctccatgtggcggcatgccgtacttaaaggctgaaagatagctctccataccctctgtctccatgccacgctttgcgattttttccataagcttgttgtagtcgtggattcgctggccgcctgttgtgatctcaagacctctgaaaagcagatcaaagcttaaggtgtatgtctcgtctgccggatcatccatggcataaaatggtctcttctttgaaggataatgtgtgacaaatacaaaatcactgccatactcttccttgaagtactgtccaataagtacctcctcctccggctctaagtcgaatgggtttctgaactgtctgttatatttttctgcgacacgctgctttgcctcgtcaaatctgactcttggtatgcttgtcacgtcaggcagcttaatctttaaaagctcaagttccttggcgtatgaggtctttaaaagctccatggtgtactgcaaaaaaccggtctccatctccatgatatcctcgaagccgtcaatgtaacccatctcgaaatcgagtgatgtatactcattcagatgcctctttgtattgtgcttttctgctctgaaaacaggtgcagtctcaaataccctgtcaaagacacctaccatcatctgcttgtaaaactgcgggctctgctgtaatatagccggtctatggaaatattcaagcttgaagaggttggcgcctccctcggctgactttgcaccaagctttggcgtatgaatctctgtaaatccattattataaaggaaatccctaaagccccttgtgatgccctcctgtatacggaacgtagcacgctctcttggatttctgagtgccactgccctgttattgagctttgcctcaagcgaagtattcagtttccatttgttgatctgaagcggcataggctccgccggctcagataaaattgtgatagtgtcaagacgaagctcgaagccgtttggagaacggtcatcactcttgtatgtgccgcatacctccacggtatctgcttcctttagatcatcgacgctaaactgggatttgcccggctcgtatacacactgtataagtccgtccctgcgtcttaagacgatgaatgcaacctcacccatatctcttatggtgtgaatcgcaccttttactttgatgtttttgccctcgtagtcgcctgcaagaatttctgcgataccgaggtcttccttttgaactgctcctgttaagaattccatatttttgtgctccttttcatagcttttcgtaaagctaatttattgtaagcgggacggaatataaatttatgtagtattgtatatagcccacgaattgctatgtgcctctgtcgaaactgggctatatacgccaaaaagccccggagcatatcaaattaatgaaatgctccggggcgaaaattctaaaaatattccgcggtaccacccgctttgagaaaaaggactgttcctgtttctccactcttatccgtaacgtggatgaatcgtatctgcctacttttgatatataaaaagcttaattcacatacgataaaccaatctatgcaataaaccatatcaatcgttcaacagatctgctccggtagtgttcctgcaatcagctcttccaaacagcgctctcagtcggtgacgctgtattcctgtcggcgtctggtgatccaagtctccttcaacgcatttattgttcttttgttgtttaacgttataacacaataaacttattatttcaacccatcataatcaaaacttaagaaaataaagtataggaatatattatagtttttcttaattgtggttataacagagccttcttttgcaacaattattaaataaatttaggctattccctattgcctttattgaattcgtattgtagagtatatctggtatatgtaattaataataatgaggcaggtaacacttatgaaaaaactattattttttgatatagacggcactctcgttgatttcggcaatagcaccatgagcccatcaaccgctgatgctctaataaacgcaaaacaaaacggtcacatgatttttctttgcacaggacgtagttacaatcagatttatccatcattaaaagcctttgattttgacggtgtggtggctgctgccggcggctatgtcactgtgggtgataaggtaattgcacatcatgtctatgggcagaatctgttacagaaggttcttgacactgttggtgacaacaacacaggacttatcttccagacaaaggataaaagcatcaccaaccacaagtgggccgacaaattcatatcagcattctcaaagcagtttgatatgcatgtgatacaggacaacccgacatttaaggatatcgtgattgatgatgaattatcaagcttttctaatcgatacgccgatgttgaaagcaccatctactgcaattgcaactaccacattgatgatttaagaaagctcctgggcgatgaattcgtagtaaccctgagcagctttaaagagcctgaaccttacagcggtgagattacattgcgcggtgtcaacaaggcaaccggcatacgtgatgtggtagagtttcttcacatgagtcaggctgatacaataggctttggcgatggccagaatgattttgatatgctgcgctactgtgatgtcggtgttgccatgggcaattccagcgatgaagtcaaggctgttgccgatatagtgacagacgatatcaaagaggatgggcttaaaaatgccatggtgcatcttggacttgtctaaaaatgcaccatggcatactctatgcctcaatattcataaatctgtcccactcgcactcgtcttttgatgccgatacaatcaaggtgtacgagcgctcatctgttccatcaaatacgaaggtataattttcattctccttctcgattaaatatgcgtatccgtcaaggaaattgttgaaggtgtcgatataatctgcctcatctatctcctcgtcagccgttgtgctctttaggttgccatcggcatcatatgtcttaaagccctcgcgtatgaatgaaataatatttgcatctgaaagctttaatataaggccgtttgtcctcatatcacggatatctctgtttttagaattatctgcctttatgattacgttgtcaaggcatattttgaaggtgccaaagctcatcatgatatcgctcacatgcacatccgaaaatttgaaatgtgtaaactcgttttctgtcctgaatttcatctgttatcctccgtatatactcatgccgatattttatcagataattttgctttgggcaacttgcattttataacgtgccgtacagctcaagtgtataccccacactgcctccgcatataaagtaatagtcgctttgagtgtcaccgtctacaaagatatactgtccgtacatctttatattgcaaaagagtgctgtgcggcttgatgcagcagcaattccatatcccttgtttgacacgacaagtggcagcctctgctgtctgcctccgaacgaaatatatctggctttgtttgtcaaatcagtaaggtctgtcgcaagtattcccttggatttgagcttttccgatttatcccagtcaaaaaatgtgtagcactcgccattatttaaaagccttggctctgtggcattttcgcttacaaggagttttctgtcggcatcaaaatactgtatggctccatttttcttttctatccttagtatcagcttctccgtttgaatttcaataagcgatttggattcctttgccacccatttgaaggctgtatcggccttttgcttccaataggttttgtgcggcttcactccaattccttttacaaagattacgcgtactatctccggtgttattggtatcacataaagtgtgccgtccgctgtggcgatttcaacatgcgatttaccttttttgagccattttacctcaaacttgccctttgaatgtacctttacatgaaggatatcgttgtccgggattgagccgtatgcgtatggggagggattgagagggaggctgctcttttttgcagccttacttacttccttaatcttaattttatttgccatatctgtagcagtacattgtgtttgattttccctgtctttttttacaaatgcagataaatcaagcttctcattttcagccttatttgtcacctgctcaggttttaatgcaatgcgcgacggaccaaaatactctctttcatccatatcgcgtctgccatcaacacgcttttgctcttctatctctttttctgtcagttgctgcttttcatattcctttgccttagtgagcggctctgcagaaaactccttctgatgcctgttggaaggagcagggtctgcaataagcggtgtcagcctgccccggtggaatacagcaagctcatgaagtgcacgagtagccgcaacgtacaaaagcttcacatgactatcatcagccggatattttctctctgatgggtcaaacagcaatacagcatcaaactcaagtccctttgtatacgcgaccggaagtaccatgactcctgcaccaaactgtgcagtttcaatatcatcatctgctatttctatatgttttttaagctcagcagacaccttgagagcctctgcctcatcacggcacacgacagctatcgtctcatagccttcactctgccagccttttatcgtgtcaaccgatgccgaaatcagtgagcgcacattggcatactcctctatgcgcactgcgttcccatgcctgataataggctccaccggataaattgcaaaatctccatggcgcagtatctctgttgcaaattctgaaatctcaacagtgtttctgtagctctttcgaagcagaccgaatgcgtcatatgtgcctgtgagtatcagctttttcaagtcctcccagtcatttaagccatactcaaaatgtatattctgcgatgtatcgcccatgatagtgtatgtgcagtttctgaggcagtaatgcagacagcagtatgccatcatgccaaaatcctgtgcctcatcaataaccacatgactcgcctcacgaaccggatctgtctccttgatgcgcttataaatatacgcaagcgctgccagatcatacacatcaaatgagtcctttggaatatctatatcatattccttctccttctgactaagcagaaaatccctgtaaaaatcatacacagagcctttccagtcatccttaccgaaataggttttgtattttttatcaagcttgctacgctcctttgcagggaacttcacttccttaccgagaacctcattttcatacttcgagtaaattatctcatttaacatgaggattttactctgcatggaaagaagcggattatcatgcagataagtgtctatcagcacctttcccacaagcagattgcctgttttttccatgtagacctcatctcttggaatagacttttcctcgtaatctaaacagaatttttcaagagcttcaaaccattctttactgccctttatgctgtttctactgtcatttttgctgacttcatgtatgctgtactttttgtcatcccaatcctcgtacaaaagccttgtaaaaagctgctccatagtcatctgttttatgccgtacacatcaagctccggaagcacgcttgtaatatagttcaacaaaatgtggttactgcctataatgtagaaatcctccggtctgaaatcatcagcataattatataaaatgtacgatatcctgtgcattgcaactgttgtctttcctgagcctgcaactccctgcacaatgatattcgtctttggcgaacggcggataataaggttttgctccttttggattgtcgcgataatctctccgagcactgcctttttattcttagccagatactttgtcagaagctcatcatttgctacgacatctgaatcaaaaaaatcgatgagctgatcctctgcaatctcataggtgcgctttctgtttaaatcaatctcaaaagtaccctctgagctcaccgtgtacttacatggtccaagactgctctcataatatacggatgcaatcggtgctctccagtcaatgaccacaggctctgatgcattctttgcaataccgactctgcctatatagtaggactcctgtgacttctgacgcggatccttaaaatctattctgccaaaatacggctttttccgcgccttttcacatcttacaatatttctctcgttctcatgaagctgcgctgtcgcattgttccacagggcaagtccctccttgtcctgtgcctcgtagacatctcttaaatcctctaaatcatctgtcagcttttttaccgattcctttgcacggtccagattatcctgtgcaatccctatgatattttgaagctgtctctgctcgtcttttaatgaaattcccggtaaatcattttctgtgcccatcatgcctccacgacttatatatgctgtgattatactatacttttaatctcatctatcctgtcaacacaggcaaaaagcatctttttcagctcctcatcaggctgtgtcaaatccggcaccatgacaaccttacagcctgcagaatatgcacttttgacaccatttggcgaatcctcaaccgccatgcactcctcaggtgccagcttaagctcgctgcatgcaaactcatacacatcaggtgccggctttccatgctccaccataggtgcacagatgatcttgtcaaaatatccgtagagccctatctttttaagatatttctcagctctttctatatcattcgctgtggaaatcgctctgtgaatgcctttttccttcaaatatgtaagtatctcaattgcaccgggcttaagctcaatacccaccttttccagatgctcctccatgatttttctccgatatgccctgattttattataatccatatccggatcatgaaacatatccttaagatgctgcggtgcatacggctgcccgaggcttcgcattgaaagtgcctgctcatccgtcatgtcgtagccgaattgcttaagtgccatcggccagaaaatacgataatatttctccgtatctatgagtgttccgtccatatcaaataatactgcttttaccattggttctccttacgttctgccaggctttactatgcttcacctgttaattttaccactgtcatatcatgatgcatggcctttatcaccgggccaaacatgtcctttgtctttatcctgaggctggatgtatttatgcatggatgacatccaacccactcaccttttagcacatcctcatccaccagaagcctgaccgcattgtcatggtcgttcatcagtcccatcacactgactgagcccggtgtgatatccagatatttttccatatcctgcggacttgcaaacgaaagtctcgcactgcctatctgatgcgagagctcttttgtcttaaaggtcttgtctcccggtatcattagcaggtaaaaatcagttttctggcggttgcacagaaaaagattcttgcagattgtcgcgccgagtgtcttgtcaatctcctcacaaacctccatcgtaaatgccgcctcgtggtctattctctgatattcgattcccagtttgtccaaaaaatcgtatgtacgaatttctttatccagtctgcctgtggtatctgtcggtcttccattctgtaattgcatttgtgcctcctgaaattaattatcgcagctgtgttcagcaccataaccgctgctattattatcttttaattgctatagctatagattatacacctcttttatgtattctaacaagccccggcatccactgattacatcatcaaaggtcgcatcaaaatcacctgtataccatggatctgcaacatcgcgcgctgctgtaagcttatgatttgtcccgtaatcagcaaatgacagcatcttaaatatcttctgctgactgtcactgccacctgcaatccttgtcatattcctgatatttgcagtgtccattccaatcagaaggtcatagtacaaataatcatcgcgtgtcatctgtctcgcgcggtgtggaataagaggaatatgctcctcgtatagtttgtttttggtgccgtagtgcggcggattgcctatttcctcacggctggtcgcagctgaatctatctcgaaaacagcatcgaggtgctgtctgtggaccagatgggtgaagatgctttgggccatggtgctgcggcagatgttgccgtggcaaataaatagtacctttattttctccattttatctcctcatatcctctcaaagccttataaatactggcttttcagcctttgtgcattttttacttgaaaggttctttttcttataaattcttgtattttctcatgttttttcgggcatttgtggtacaaatgggttatttttaaagtcccaaattccttatgagataaggcttacatgagttgtttgtgcatgtttttgggttataaactttttcttttccagttcatcccttgcttcttttaatctggcaagttctttctttgcatcatcatagccggtatgcgtataaatattaagtgttacagatacatctgaatgccccatcagatattgcagtgtctttgggttcatccctgaattggccatatttgtacaataagtatgcctgcatatatgtggagtaactggcggcaattgcaacaaattctcacgattatatttttctcttgcatgctgcatgtacttttcccaatgaagtgcaaccattggccttccattcttgtccagaaacagaaatcctccatatccatccaccatcggctcacgttttggtttccttctattcttcaagattcgaagaaatgcttcttttacatccgcttccattggaagtaaccgcgtaccacttgttgtctttgtagatacgatgatatacttcatttctcgagttctttgcaactgatgattcacattgataatatcttctttaaagtccaagtcttttacagtaagtccacaaaattcagatattctaagacctgtcttgaataagatataaaatgcatcataatactgattataatgcggatcattctttacaaaatcaagaaatttagtttcatcttccggagaaacagcttgtcttttctgactgtcattaacaagtactgtacctaattcaaatccaaatggattttttagaatcaagtcatcatccacagccatttgaaaagcaggtcttaaaacacctctgatggaatgaatggaactatatcctctaccatctctttgtagttttatcagaaaaatctttgcgtcagaaagtttcacatcatccactttcttataagcgaattcttcctttttcaatacattcaccacaaatttgtaattcgctaaagtattatgctttactcctgttttcagggaaagatatcgttccacaagttcaagcactgtaatgttacttcctgtaatcccttgcatctgtaaggactgaacttttctttctttttccctgagagaaagatctgcccgtttaccttccggcatcttatctgcttctgtcaatctccaactatataatattttacgcttaccaagtgaatctgtatatttatagcggtaacgtccacttggttcctgccattctccttgctggagaactctgcctttatcatcacgtctctttgaaatcatatcctacctccaaggggacgcaacatgatattgttagtatatcatgtaacccctaattcgaacacctccttcttttaaatttcattttatatcgcactgagtgtatcaataaatttttcaaatcttgttcgttttatctgtacacgattcccattccaaagcaaatactctgcatttggattgtcactgactaacttacgaagctttccttctccaatacgaaaataggatgctgcctcttcaatggataatgtatacttcttccaataaggtatatcataacttgtcatttgtatgcctccttctattatctttgtttttgacattggcggctggcaaaggtatctataaagactgccaatgccaaagtagttttttgccaatgtcattctttattctgtgattaatgcaactgtttttcttccctgacaccagtcgtagctcaatctgttttccagctgctttcttgcatctcttcctgttctggaagaaatcccataggctagtagttctgcctctaattcttctaaacacattactttccgtttggttaataactccaggatcaatttctgtgccttttccagtttcgtttcctttttcgttcctgctttccccatcagcagatcttcaatggatatatcgtattctcctaaccattttaagccttcttctcctaaagaaaacgctaccggattttccttcttagcaagagaatccttttgctgatataccactcggacatcctgttccttctctttttccaccttttctacaaataagatgcttcgtactgccgctgcgatatcaatggatcccagggaacggtaatcgctctgacttcccgatgacttattcaaatgtccaatgagaacaatggcacatccagttctctctgcaatcgtactgagatgtcgaaataagggacggatctcattagcccggttcatatccacattggctcccagataagcctgtatgggatccatgatcatgaggcgtacattgttctggcggatggctttttcaatccgatcgtccgtcatagaaagctgtttttcatcttcattgataaatcgcacccttgtcatatctgcaccacattttgctaatctaggcttaatagtatctgcaatcccatcctctgctgtttgatacaacacattaaagggttctatcggaagtgcattgggaagttcctttccgttggtacagtatgcagcgatcgccattgcaagccatgtttttccttttcccggattcccttggatcaaagtaacctttccaaagggaatgaagggataccataaccactggaccaccgtttcctcaacctccgacattttcatgaccggaactggtttttccctggcatctctccaacacatctgctttgccatattttctaccggaacttctgctaccagacattcattccagtctttcttcaccggttctaatcggtacacactcagttcctcctgaataagagaaacaaactgcctgcatctctcatttccaggctcatcattatccatacacaagtagatggaatggatatgaggatattctgtatacatccgtttcattgctttttcactcaatcctcccagggaaatataactatgcttttcccattcttctggaactgcagtgatataagacaaaagatcaatgggagattcaaacacaaacagtttttcatccgttcctatatggccaaatccataggctttttccgaacctcttgcctccccacgatatttgttctcatcagttccacgcatagctgcatatctgggattttgttctttgtctcttccaacgaacaccacattgtgatagtttttactttcataaatatcccccttttcaatcatctgatttaccagttgttccgatagttttctctgttcaatgagatacttccttgcaatctcacagctttcatttctttctggcagttccaatccaggcaaggggatggggcagaccttctgtctgcctgcatcttccttcgccgttcttctatcggtttctctttcttctcctaataattctttgactgcctctgcaaaagaaagaccgtagaattctttcataaaatcaatggcatgaccgcctttattctgactaaaacgataccattcgttcttgttgatcatcacactgtcatgtcgtaaccaccggtattcttttccacatcgtttgaactgttctcctctcccagaaagaaaaacatataaatcggtatcatctgctctttggatttgttctcttgtatattcttccatcttctaaaattcctcctataattccattccatgatgtttcttctttcgtttcatggttctcactgcttcttttgtttctgtggattgctcccgtttgtttgtttctggaagagagacaccttctccttcctctgccatcaaagcttccacatgatttttgattccctcatactttcgtaacatggcatggatccgtttatcttcttttcgtaaagcagctatctcttctgataaacgagcggcttctcgtttccattgtccttccggaatcttcccacttgggtctagattttcttttaagattctttccgaacgataatatccgctaagttctttcttatgttcctctttgaatttttccctgccaaaatatttgttctttaattccagataaacaggtctcgtttcaaaatactctttcattgcataaaggttgacattgaccctttgtaaagcagccagttgttttttcaacctctggctcacttccttcagctgagtatcgaattcctggattttctctgtcagctgttctggggttctcacatcctgctcttccagaaagcggatcgtctctgcaaattgtttcagatttgtattcttcgccttttgtgttccataagcgtaggattctgcgactgcatttctcttgtcataatagtttcttagataatccgctaaagttggctgatgtaagaacagcatccgttccatcaactggctttgtcgaaacaacgaccattgaagaagattctttgcccgttctttcatatcattcaaggcacggataagtcggtttaaacttcccagtgcagttgaaattcctcttgcttccattgcctgtacgttcggtccttcatgcaccatcgggatcttatcaatcccccgttcctcataagatctggcatcgactctttctgtaagtcctttttcttcatacagttcgttacacatcctcgcccaggcacttctcaattcttccaaggtttctttcctactccaatccgttgtatgtaccgcccgaaatatcggctgtcctttctgattcaaaaccggctgtccatccggtgttaatactggaatctttttttgtttttgtccccaggtaccatcttcctgtaaaggacggatgggaaccatgatgtgcatatggggattggggattttatcctttgccttcttcggatcatggatcgctagatctgcgatcatccctcttgcgactaactgttcttctacgaatcttcttgcaagctcaatattttcttccatagaaaactcattcatcaaggcaatatcaaagctgtgtgccagctgtgctttcttatttccttcgatccattccacctcattccaaagtatctccctgtctttgaatctctccggagcctgttggggaagatggatctccgctaataccacaccgccttttctcgtataatcacttacttctccataatacgtacattccagttttgtaccagcccgataggcagcactggcaatggcagactgtccttttcctctggacaattgattcagatgaaagtgataacatcccatcttactcatctccctgtggcagttcacctcgctgcatcgcctttaatagtgcttcctcttcttctaattctcgttcttttgcttctgcagtttccgcccgtccacgaaccatttcatgaacgacatcacaaaacttacaagcgggatcatgaagaagttcatctatcagctgataaaattccgcctctgtcagatatttggtatctttacagatagcttctatggctgctcctttctggatcaacagatgagttcgtgcctttcgttttttctttttctgtgtatccagatagttcaaggatctctggatcctgtgctctgcctgttccttctcaagctttgcctgtttcaatgcagcttctgttttttcaatctcataaagtgcttccttcgtatattcctgaaatgtttttttcttcgccatatcatttttcctccttttcaattctccctttttctctgttacgggataggcatttctgccggaagggaaacccttcttcggatggatcatccgcaaacactttcggaatttcccttcagaaagatgctacttccgtaggacgcacataccttttaaggtatataagtgcgctcttctgctttcagcatccgagtttttcttactcaaacggaagttcttctccgtctggaagatgcataaatccatctggatcggtatcttctttcttttctgatcctgacagtttcttcccttctgcgaaataatgttcttctacaatcacgttggtggcataaactttattcccctcctgattcacatagcttcctgtctggatccgtccgcttactaaaatcttcaacccttttttcagatatttttctgcaaactcagcattcttcccaaaggtaacacaagaaataaaatctgtttctgcctttccatcctttcgatatcgtctgtctactgccagcgtgtatcgtgccattgcagtactgttttcattctggaaatatttcacctccggatcttttgtcagtcttcccattaagattgttttattcatgtagtttctcctttcccttttcgttttttgtttgttcttgaatcaggcccgattcttttaaggcaaatgtaatttgtgcctcatatatcagaacgtagagagggctttttacaaataaaaaatgaattttatttttttgctctcatataacgaaaggttcagaggggaaaatacagggtggaaaaggaaattttttatttttctgcacaaaaaatacccctatgacttcaaaattgaaatcataggggcatttagttcaacctactcagtagggtgttttatattttcttttatacatgttattacagtgtttttcggttcgacaagctgaaattgttattcatcttttgtttttttcttataaacaattgttccaacagaacttccaagacatatgccaattgctatgcctaacgcaagattatctaaaataattccgaatactacacctaaacataacccgactgaaattccatttccaaaatttttttttttatccttcatcataatacctcctgcaaagtcaactttttattattcatcaaaatagaataattcctcaaattttttatcaagtgctatacatataatcaatgctaatttcgccgttggattaaattgtcctgtttcaatagaactaattgtatttcgggataccccaaccatttctgctaatgccgattgcgagagttttttttctgttcttgcacgctttaaattattttttaataccaatttatcatccattagaataaccccatacaaaatttataaaaaaagtaaactgccaatagtaaaaatacaacaccgcaaattatactccatttcttcttaagtttaatcccttcataggtaaatcccaatcctgatgtacaaaacaaaatagaaattatatctgccggagactccatacaaaatagtttaatgaacattataataatgcctaaaacagtaagcccccaaagagaaaaagcatctcgttttgtacgcacactcttttcacgttcatctccataaatattttcttttttacttctagctaaaatttcttccttattcattgatattcccctttcttaaatgccaagttttatttacattcataatataccactaccaagtttacttgtcaattatttcccaagttttctttgcattaaatcaatgaatatagaagcaagagaaaatacttactttcataattttaaattttcttaactcttttaattcaataagctgggatttacagtgctatctttttccattttctaatcttagttctaaaagttccgaaaggagcaacagtattaacgtgaatgaacttgtaaacttcccataccgctgcttttgtagcatcatcggcccactttctcatatgtggttgaaatagttcttcctcactcattgagtcaatcattgtatggatagatgtaatattttcttttaatctatctttcaattctgataatgaaaaatgtgagtaagtatctgtaaaccattgatataaatcgcctaactgattccacttaaacatatctgatggtgttttcacttcaattccatgtttctcatcatcttcccatttcaaaactaatgtcgtccatccaacttgataagcaagattttctgccggagttctatctacttcgattattctcttatcttttaaagattcaggaatattatcaaattcagagatatacttttcaaagcttttatttatctcatcttttaattcctctttatccttgtatgttctcaaaatatcccctccacaaattcaagtttgccgaaatatctttctaactttccctattttacaggcttttcagcccattcattagtgaaatgatatgtattttcccttatttttgcccttatgagataatcgtaagggaaataagggaaagttttatttagtcgttgcctgccactttatcaagtaactttgcggattcccgcttggcttttcttgtggaatgggcgtagacattcattgtggtactgacatctgagtgccctaacagttcctgcacatcctttggtgctgctccatttgccagaaggttgcttgtgtaggtgtgtcgcaactggtgaaaatgaaatccttcaaatccatccagtttctgagcaatcttcctgcaaacaattcctaacgtgcttggcagttccaaacttccatccggtcttaagcagacaaaggatatttccttataatcttctggaacattctctgttccgtccagatgatagaactcatagtaaactctgtttttgtcttttacttctctgtagtagtttttatggtaaagttctccgtactgcattcggtttttaagttgttcctttcgggcattgcgaagaatctctgccagtgtatctccaaaatcaacaatccttaccttttttcgtttggttggtccgatgatattcttgtgccttgaaccatcatatcggatactgcgtctgattgtaaggcactgttcttcaagattcacatcctgccatgccagaccacaggcttcaccgatacgaagtcctgcataataagctatctggattggaagtattgccggtggattgtaattctgtagaaattcaatcagtctttcataatcctctcgtggaattggctgtatatcgccatccatgtcatcatcggaaaacaggtcaacctcatccgtctggtatttcagcttaatatactgcatcggattgaaagtgatatattgctttggtgatactgcaaaccggaatgactgctgtaatactgccgagaaagaacgaatgtaatctttgctgtaaccttttctttctgaaccatctggataagtgccaccaaaggaaagcagatcgaagaaggcttgtaaatgctcagatgttacatttttcaactttctctctgaaattggatgcttcttgatgttggtaatagcaccaaggtaattctggactgtcccattactgagagtaccggtctttaattcttcctctgcccatatatcaagtaattctccaactgtaatattttccgactttgcaatgaatttcttgctttcgtaatcgtccattgcctgacggagcagtttttccgtttcacttttgctttctgttccagcgtattctttctgaaccagattgccgcttgcatcttctacatagaagcggtagtaccatttctttcctttttttcttacagatccttttgccataatcgtgtgtctcctttcgatatcagacaatcggaactgatgaaatgcttcttgcgtgtaggcatcttatggacaagtccataagccaattcgccgctcgtcaaatctgtaaacagcctgacttgctcgtgctcattgtatcataactccggttgtcgttctataccgaatcggaatcctcatacaaaacttctgataaaagattttcaagcctttgttctgccatttccggtttcttggaatagagccttacaatatctgccatatcattaaaggcattaacggtatgggtgatctcccggagaaacataatctcgttatattcatcattcgattcaaatcccattgcctttgcaatatccgcttcattcgtgttgcccttgtaattcttgcaggcaaactggaatgattccagaaacaggttatattgctttaacatcaacagcagtaaatctttggaaaaagcatcttcctttttactaaggtcgagaggtaactgtttgagaatatcgcccattgcatcacgaatctgtaattctttcttatccgtaatatcggtttcgtattcatcggtttcccccttgagccattcaatagatacatgaagtgcttccgaaagaccttccagcaccatctttttggtattgtcaatcgaaccattctcataacgcaggattgtggaagcggtaactcccatcttctctgcaacataaggctgtgtcagatttaattccagacgacgctgttttgccctgttacctatcagcttgcgtagttctttatctttcatgctgattgcctcctttttcggtatgtatgaattatagcatgtacctcacataattgcaatatgcaatctaatgattaattttaaaatttcataacgcttgacaacgcaatataaaaccgctatactaacagcacaacaaaaattgcataatgcaatttaacgggaggtgacaagatgacggaaagaaagattgcattatccatcgaggaagcagccgactatacaggaattggcagaaacactttgagaaagctggttgaatggaagaagcttccggtattaaaagtcggaagaaaagtccttattaaaactgacattctggaaaagttcatggaagccaacgaggggcgagatctgagggataaaggaaatgtaaaagctgtcacaagaaatgtggcaacttaaaaaggcggcttcctaagaaaccgccaaaggttctatcagaccgaagccatgatatacctacacgcaagaggattataccatgtgcttctcctgatatgcaaccgggaactgttgtttatcggaaaaagaaaggatgaagacgatatggcgaaatcaacaaagacttatgaagaaagaatacgtgcattagagaaaaaggaacaggaaagcattgaagctacaaaaaagctcattgcacagcggaaggaactggaaaagcgaaagaaagcagaggaaagtaaaaaacgaacccacaggctctgtcagattggtggcgcagtggaatcggttcttggctgtccgattgaggaggaagatttaccaaagttgataggcttcttaaaaaggcaggaaacaaacggaaagtttttctcaaaggcgatgcagaaagagccacttacagatatggaggaagtgtaatggcggagggagtggtttttccattcccttcattgcctttgaatgaagggcgcacttatggacaaccagaggtcgtccttataagtttgccacaagtggcaaccggtctgcgcttacgcttgccgggctcgttccgtcggcggggctttcagccagacctgctcatgccgcagggggcactcttgcgcagagggcgttccgacagcttcacttctgccaaaccagaagaagatgctgtcggaaatcaatgccggatacggcagaaagggggaatcgtatcatggcgatatttcactttacagtaaagattgtcgggcgcagtaaaggaaaatctgtcatatccgcatcggcatatcttaatggagatgtgatgaagaatgaggaaacaggcagaatcagttactatacttccaaaaaggaagtcgtctacaccagtctgatgatgtgcgaaaatgcacctcctgaatggctgcatgtaccggaagaaaatataaaaaggtttcaacagtctatccgttataaaagagcggatgataaagatgccgcactggaaaagtttaaaatcacatttcagaaacagcgtctatggaatgaggtattgaagatagaaaaaaatgcagatgcacagcttggacgctcatttgaattttccctgccgaaagaatggagcagacaggaacagattgattatacaaccgaatatattcaaaagactttcgtggataagggaatgtgtgtcgactggagcatacacgataagggcgatggaaacccacatgtgcatttacttgtaaccatgcgaccattcaatctggatcattcatggggcagcaaagaagtcaaggactgggattttgtcagagatactgacggaaatatcgtggttgatgaatcccacccggactggtggcaggataagaaaaatcctgaccggcatggaatccgcattccggtacttgatgaaaacggagtacagaaagtcggggcaagaaaccgaaaacaatggaaacgggttctgaccgatgctaccggctggaataatccaaagaattgtgagttatggcgaagcgaatgggctgggatgtgtaaccggcatttatccatagacaatcagattgaccaccgctcttatgaaagacagggcaaattaaaaatccctacgattcatgagggtgcggatgcaagaaagattgaggaaaaatatctcaccggacagatatggaatggttcatggaaggtagaggaaaaccagatgattaaaaaacaaaatgcactactgcaaaaggtaatcacaacctttggtaaggtatccggtgcattgtcaatatggagggagtgtttgaatgacattagaagaaagcaaagaagtaattcccatgatggaagcaatgattacacagatcgaggaacagcagaatatcatggcagagatgcttcaggagatacaggaaaaggacgagaagctgatgtgttttcaggagcaggaagaacgattgcagcaattagagagcgaattatcagagctgctacaaatcttaccgaatacagaagaactgttgatgcttctggaagaaaagacagaccagatacagaaactcacagacgaaaatcagcaatggcaggaattggcacagaaattaaacagcgagaaccggctattgcagaaacagaacagcgaattgttgaacttgaacagcaattagagaaaggaaggttgattgatgaacgaattaagaaactcaaagagcgacgatcaactggaagaactgctaatgctgacggagcagatgcaggaagaactcgaccagaaagaccagactatcgagaaactgaaagtgcagctcgacgaatcgctgaccttgaacgagaggttaaacagcgagaacagagtcgggaacattcaagccttaaagaacgacttgaggaaaacaaaagaattattgcagagagagaaagagaaaacgcacaccgcccaagccatgatagaggaatgtcgagataagcagagacaggcagaacaggaacgggattatgcactctcccatcagaaaaaagtagagataccggttgaaaagccggtgctctatcaaaagtgcgggaattgtaaacagacagcttatctgaaagctaaggaaaggtatgatacacagagagaaaaactggcaggcagatataaagcaaaaacagctatatatgaagcattgatgtttctgctgatatggtattccgtatcaactactctttttcagatgatacggtcaaaaatatttatttctgattgcgtggtattctttgatacaatcgccacttttatacagaacattgcaggattgactatactggcagggaagaatgtggcacaggttagcaatggaatatccaatcctgtcgttgccggaattatatactggatgataagaatactgatttccggtggatgtctggtgggtgtgggaatacttttggcattcatcgaaataaagattgcagggctatataagaaatactgttgggatatgattaccataatggtgatactcgtaagtatggcaatagcaatctatttcgcagattggataaggacaatattaccagtcaatctactgtttctattgttattggtacaggtaatatatgtcgtgataagatggtatgtgaaaggctggcgggaaacaaggggatattactaaaacatactataccatgcctaaaactgttaaacaataaatcggcataattggtcatttcatgatgcaagataaaaagactgattatgtcgatatacagattctgtgaatgaatgaaagtggataacttgttttgtccgagcaagggaactataatgttttggtagaagtaaaaaagacaaccatttggttgagaaaaaaagatgcagaaaaacctattgacggaagaataaaaaatcaaggagtaatcatgatagaaaacaagataatattgattgaagatgataaagaaataagaggaatgataaacgattatttatcaggagaatttgaagtgacagcttttaatgatggtatgtcagctatccagaaaattacaagctatgatgaatatgcgcttgcgcttattgatcttatgttaccggatataagcgggatggagattattaagataattcgtaaagtcagcaagataccaattattattattactgctaaagacaatgatacagacaaatcattaggattgaatttgggtgctgatgattatgtggtaaaacctttttcactcattgagcttactgctagaataaaggctaacatcagacgagcaagaacctaccaggcgttaccgaataattcaattatcaaaattaaagatatagaaatcgaccctcatagtcacatggttcagcgcaaaggagtaaccatagatttaacgccaattgaatttcaaattttatacattttagcaagccatccggggcaggcttattcaaaggaaaggctatatgaactgatttggaaagaaccatattttggaaatgaaaatgtgttgaatacacacatcaatcgtcttcgcttgaaattgaagagcaatgcagaagacagtacagcctatgttaaaactttatggggcattggatataagatggaggagaaatagatgatgattttatttgtggttctttcatttgttatggtttttatattgatctggcaacagatacagcataaaaaattagtacgagaaattgattatattacaagtaggcttgatactatttctgtcatttctgaaaatggctttgtacttatacctacagataatgatagtatcaagaaattaagcgctgcacttaataagctgcttcaggatttttatacaaaaaagtcacaatttgagcagagtaaacaggcaatggcgaaagtccttacaaacatctctcacgacatccgaactccactcactgttctaaaaggaaatagtgaaatgctttccaatataacaaacacttactctgcatctgaaaatgttcatgctatggctgttaaaatagaccaaaaggctgatgatttaatctcaacaattaacgactattttacaatgtctaaaataacttctggagatttttctattaaaatgaaaaaggaaaatatatcaaggatttgccaagatacaattttggactactatgaccttcttgaacagaaacaatttgaagtcaatattcagataccggatacaccgatttttgcctatacagataacgaggcgttacaacgcattttaaaaaatctgatagacaatgccatccgacatggtggtgatggtaagtatatttctttaaggctcatcacatcaaatggaaaaaacattattgaaatagaagatcgaggagatgggatatcaccacagcagcaaaaacagatctttgaaaggaattatacaacagcccgaaaaacttccggcagtggtttggggctttcaatttcaaaatgtcttgctgaacaaattggggcagacttagaagtttatagtgtacaaaatgagcaaactattttctcaatcatcttgaaaaagttagaaaatcgttagatttatgacagagaaaagagaagtccattttgtataatggcagctataaaggaggcacacaaaatggattatattatggaaaccgtaggtttgcgaaaagcctacaaagataatattgttgtagacgatgtaaatatgcatatatctaaaggggcaatatatggctttgttggtccaaacggcgcaggaaaaagcacggttatgaaaatgattttgagtcttatccagccagatgctggagaggttcagcttttaggcgaaaaagttaccagtcacagttatgaaatattcaaaaaggttggttctattattgagaatccatacttttacgataaaatgactgccagacaaaacttagagctgcactgtgagtatatgggatttcccaacaaggaacgaatcgatgaggttttgcatttggtggacttgcagaatgtcgagaaaaaacaagtttgtcattactcgttgggtatgaaacaacgacttgctattgcaagagctattctggcaaagccagaatttttgattttagacgaaccgatcaatgctttagaccctgagggtattcgtgaaatgcgaaccctttttcaacggctaaatcaagaagatggaacaactatttttatatccagccacattctatccgaagtggatcttcttgctgatacgattggaattattcaacacggaaaactcttaacagaattacctatcgaagaaatccataagcatcaaacagattatatcagcttgcaggttgacgatgtgactcgtgttgctgcactgcttgaaaacatgagaatcacgaattttagtgtattagataaagaatttatccacatttatgattctgatatttcaggtaaagctctgtcaaaagccatcattgagaacgggattggtttggagagcatgggacgcaagcaagacacactggaagatttctttttccagcttacagaggaggaaaaatgagatgacacatttgatcaaactggaactgaaaaaatttggtattgcacaaaatattatctttatgtttgccgcaattcttttcagcatccttttcattacaatatctttatgggatagcatgacagaccccaaacaggtcaaagacacatttgaaagcacataccttgtcattggcttattgatgtcattcatttttcttgtgtactcgtcggtcttaacggcaaagctggttattggagaatataatcatcgaacaattacgattatgttttcttatcctttaaacagaataaaattgattgccagcaaattaactataatcatggtttatacagcgatttcaatgacgattggatatatctgttgtagcagttatattatatttgcggataaatcctttaatatgctggagggaacatttcaaccatcaatgctccgaacatggataccaatggcaataaccactgtgattatatgtatggtgctgtctctgtggtcatttattattggcatgatcagaaaatctgttcctgcaacaatcgttacttctttgattgttattgtgttacggcaagttattatcaccaaaaacacaaccaatcaggagtccataatgcaagttatcttagttgctattgttaccgtcattgctacactacttatctttaaaagaaaagtgcctgaactatattgattatttctatttttacaaatggtaaaagaaaaagccgtcgcaaagcagattcaatttcatgtatttatataacggcggctttgatttttaaagtcaatgtttttagtgattacacaaacagatgacaacttacatgtatgtggtagctgacgtaagtttggattattttaaaagatttccaatgaatcttccgcatctacccacatctgcatattcccatccagatataatcgtacatattcaagcggttcatcaattgcaagtgcatttaatgcacaatctgagccaggcgtagtttttaaattcttttctgcttcccaacagtcaatgcggagcatatagctcgcagaggtataaacatcaacactattacgttgtggattgtattctgcaaatattgttctcattgtatcaaatctccttatcattcaatcaatcatttcttacaaaaatcagaagcgtttcaatcagttcaccatgtcattttcattttgtgctataatgtgttatcagtttttttgcccttgtatttgcccttatcagagttcgtaaacactggtgggacgatataacacaagggaaacaataagggaaagctcacctgcgccaaacttagtgttttcaaaggcttgagagatatttgataataaaagataacaattattaaatcccttggaatacatgaaatctcaattctaatttatcattttctttcagtatatcataattataatctttccacaaaacaaaaaattttaattcctacggatttttctacaaagcatataaccacatattattacacttcatcaaaaaaactttctcaccctatattgaaaaatcgtaactgaatatccgacattctatccatcaatagtttctctttaacaaatatcatcttagtacggtatcctgttccatctggtgtaagttttactacacttattataacttcaaaagcaaacgcccaaactgctttcttattaaaaaaacttagaagagacattctcctctaagcctttatactttatcatagaatactttttacttttatatttcctcatggtcacgatgcttttttcgcttaaatcctaccttttgaacacaggatattacatgtaaagattttacccccactaaagactcttacctcacctcataaacaaccttcacaaaaacgcctcttttgttacatctatatgtaaagaactatctgcttttttacatttaaaacacgctataccaaattgtaaagattttactttcaaatttatttataaaaaaagctgtaagattccactattagaattcttacagctttcattctcatcatgtcacatccctaaattataattatttatcttgtaacactcacacaaaaatctatgggttattttcgggttatttcttccacacaaataccttccaagtattgattttactgactttttaaggagttcttcaaagagtgccgtggcagatgaatagtactttaatcatctttttatatctccatttaagtcttgtatttcttctcaaacgcttgatatttcagggttttccgacttttgagttttcctttcttttcaaggtatcttctcaaatcttctcgtattttcttatgtttttccctgcaatcttggtaaatccattggtaaagcaagcgtccttaccaacgggcttttttaactattcgctatccgatatacttcttcctttgcatcatcaaaattcacatgggtgtaagtgttcaaggttacactgatgtctgcgtgacccatgatatactgcaaggttttcggattcatcccggattttgccatattagagcaaaaggtgtgcctgcatacatgaggggtaactttcggcatctggatacggtaaatcctgttgtatttctgaataatatgctccagatacttttcccagtgaagggcaaccatcggcatatcgtttttatccagaaacaagaatcctgcatatccttccaccatcggttcaacttttggtgtcttgcggttggcaatgattctgcgaaaacacgctgcgacagcttccgtcatcggcacatagcggatgcctttatctgtttttggttcttcaattacatactgcatctgtgcagtacgctgtaactgatggtctaccttgatacgcatttctccaaactcgatttctgaaaccgtcagcccacagaactctgagatacgaagccctgtgtgaaaaagaatatagattgcatcatagtatctgctgaaatgtttatcttcctgaataaacttcagtaaatctctctgctgctttcgggtaatcgcttctctggtaacagaatcattgacaatgacggatgcaagttcaaattcaaatggatttttacggagcagttcatcatctactgccatctgaaatgccggtctgagaactcccctgatagaatgaatcgaactgtatccccgtccatcaatctgctggagcttaattaaccatgcctttgcatctgacaaacgcaccttatcaattcgcagattcccaaaactctcttttttcagcatattgatgaccgttttatatccggcaaccgtattgtgacgaactcctgttttcaatgaaatgtacttttctaccagttccaaaacagtatagttgccaccgttggttacgatacggtcaaacaaatccgcttcaatctgtttttctttctcacgcagggaaggctcccgcttcttcccttttggcattgggtcattcttgtccaaacgccaactgtatacatttttctcttttccgtcctcatcaatatagcggaaccgatacctcccatccttacgctggtactcgccctctcgcaaaatccgattacggttatctcgtcttttctcactcatcgtgaactctcctttcaaaaaaagagagccagacttgcactcttatcatagcacaaatccggctctccgcatagttatatcatgtgaaattggtaaatctgtcagctctgtttacacagccgtagcctgatccagatacctctcaaatttctcacgcttaatgagggcacgattgccgttcatcacataaaaatcctcattgggatgtgcatcaataagcgttctcaattttccttcgccgatatgataatatctggctgcttcttcaatggtaagcgtatatctacgccacaccggaatatccgagtaattttttccttcaatattcatcttattatttgccataggcagttatcctccatacatgaaaatagccagacagagggtgtcggcaacgaagtccggcaacgggcttcaaaagaccttgcaaacaatctcaatctggcgatggttactatttatacttttcttttatttttctgttgttttggttgttataagggagaaaagcccgcagttatgggactttccccgacaaccggctcggcaacgggatagcaacagggggtgcaacgggctgtcattttcagaatggaagctccatctgttctgtgacctccacaaaaccgtccgtcgttttttcagacgggttgccggagtctgttgccgggtcttcacgctcccagcccttttgtctgccatattccgaaaacattcttgggttcgggaagtaccgccatccggaaatgcactggttcataatctcgttgatttcccggatttcccattgcttcggctcgtcaaaggcatggttcaaggcttccttgtagagctgcttggaacagaccatgctcccggtgtacttatcaagatacgcctgtatcattccggctttggtgtcctccggcataaaatcccgctggtgttctttgagataccgctgcatggcggggctgaaagccagcttgaacctgccgcttcggtaaatctccatagcttctgcccacatctgctcgatataggctctggaagcagcttcgtcctccaaaatgtgaacctcggcttgctccgggtacaccatgacggggataaagcggcggttgccggaacggtcaaggggcaggaagtcaagggcattggaagtgccgccaaacacgcactgacgggggcgatctgccgggtgggtttcatagggtatcttgtaaacttctttctgccggcttaaaaatgacttgatttcctcaatgctcttggcattggcggttgccatcatttccgacatttcgataatccagtgaccttgcagcttgcggtacacattgtcatcatccagcttccgcaaatcatcggagaaccactcgtcccggactgccagcagacggaagaaggtggacttgccagccccctgaccgcctaccagacagagcatgatttcaaacttgcaccccggctgaaaggctcgtgagattgcacccagcaggaacagcttcaacgcttcataggtgtaatcatctgcgtcagcccccagaaaatgccgcaggcagaaacggattcgttctgtcccgtcccacacaagggcacttaaatagtcccggatgggatggtacttgttttcatttgccacaatcccgatggcgttatcaatctttttctcattggtaagcccataggtttcttccagataaagaagcagatacttcatgtccgtatcgttcagggcggtgctttctctgtgaaaaccgatgggctttatgatgtccttgcggtcggtcaggatgttgtatgcgatagccccggaaagcagcgggtcacgctggaatacggtcaggcagttccgtatgctctgacggacaccgcctttctcggtggtttccagccccgccttgatttcctcaatgctctggggcggctgcatggcgttcatggtgttttttagttcttgctgcgtctgcggctgcaagctctgccattcgctgttcaagctgtatcacatcctttccgtagtccgtaatcaaagccgctttttcctctgtctccccgaacagcagcacatccagcagatattccacttggtcttgcttctgtaaggcttccacaaaccggggatgaaaggcttcctccggggagtgcggggcgtagtccgttctccatgccataagcaagtgaagataatcggtaagaatacggaagcagcggttttttgcttcctgaaactgctcctccggggatttctgccggggcttgggcttttttgcctttcccggcggtttccagtcctcataggaaagcccgaagtcctgtgccagttgtacggcagcttccttctttcccagcccatacagggcggcggcaaaatcaatcacatccccatccgcaccgcagccgaagcagtggtaacgccgatccagcttcatgcttggggttttatcgttatggaacgggcagcaagccatcccgttccgacctacatggattccataatgctccgcagcctgtcttgttgtgacggactgcttcacagcttcaaatacattcaaatctatccctccttgaaaataagaaaagcacctgacattctctgcttgaaaatggcaagtgcctgttaaagttccatatcctgttgtctgtgtttcgtctgcgccggggcagttctttgtgcttttttctcgtctgccttatccagcaagacttctttgatgggctgcttcttgggcggctctttgctttcctctgtgccgggtgtggctttccgtacccagtagcggatgtcccgcagcttcttcaaatcctcctgtacctcggtcagcggtactttcagctctgcgatttcgctgagaagcgtttcctgctcctcttgcaactcctcttgggtgctgtccttatcatccgggtgcttggcaaggtaggcggcggctttcgcatatcgggcaacctccgggtgttcctgtttgaatttctcctttgttttcttaaaaaatatcttctggtacttctcatagacaggcttacattccttgcagtctgtccggctggcaagaatcccgtcaatcactttgctgcgggcttcctttagcttcatttgactgcggtaatctgcggctgatttcccggaagattccagaaacgcttctaagtcctccacagtggatagccccttttgccggagataggacagtgcttcgctgactgcctttaagtcctgtgaagtcccccggttctgtccagctcttgtccagtccttccgttcttcctttcgtatttccatatacttcattagcagattgggaagaagtgtcgcttcctccgccgctttttgtgcaagcagctctttccgtttttcgcccagctcggtaatccagcctttgagattttggataagctgccggatggacttcatcagactgttggcggctctgatttcccggttcaggttgccgatattcgtctggataccacgcttttccatctgccggacagcagccccctcatggacagtagggacaacatcaagcccctgtctggcataggaacgcaagtccacacgctccgggcggttattagcttccagatagcggttctggataacctcccattcatgccgccagatttcacaatacttctggtcgttccagtcaaccgtatcctccttgtgacttttccacctgccggacggcagctttatccgttccccgttttcatcaaggtcataaaccttgtggctcttgggaagccattttccatgttcgtccattgccctcatagtgagcaggacatgggcgtgggggttgtgtcccggcggatgggggtcatggatggcaaagtcagcaatcatgcctttggaaacaaactgctgttcacaaaactccctgacaaggacagcgtactggtcgggtggtatctctcttgggatggtaagcacccacctccttgcaagctgggagttccattgcttttccaccgcttcggcggcgttccatagggtattgcggtctgcatactccggcggggcatttgccgggagcaggatttcattgtggacgatgccacgcttttccgggtagtgcctcacttgctggtcgtattcacagaacagcttttcgccactctggtaagcagcggcggcaaccgcagactgtcgctggctgcgctgcacaatcgtgatttcgttgtgtggacagggcatttcgtgtccctcctttcggtaattggtggatggggtggcgttttaccacctcatttggggcagaaaaaagcaggagaccttttcagatttcccgctcggtgtgccgctgtgtgggcggcgggtatttagttataaaagttcggggcaagttgacccgatgtataagaaataataaaccagaagtttacaagctaaatttgttacaacaaaaatgtaaatactctttaaccgatatttctttgctattcaaaattccaatagcaacaaatataacttctgcaactgtaagatagcagtctttcaaatcaaaaataaaaagggtaggtatctgcaaaaaatctaaacttccaccccaaaacagcttatcaatcaagctacataaacatcccgatatgccacaaatcattattatttttacccaaaaacttatatgtgctctttttgcctgatatagcatatatcctgaaaaaaagaggaacaaaacaaacacattcaataaaatggtaacaaacggacttgataataattcgaagaaatttccagcataagataaacgagtatttagttctggattaaatcttaaaactttggctattatatcaaattcgcatttcataaatacttttgaaattactattttaaccgtctggtcaattaaaaccaataatgccacaggtataataaacggcttaaacttttccatcagtaacacttcctctcaaattattattttattatttcttctttttcgatttaggggtaggcaattcctcatacatagcattaaacaatcctgtcaaaaactctttattatcaacttcatctaccaacaacatttcttttgctccctcgtaaggtaactcatacgaaaccgttggcatataacttattgctgattttactggtttaacaagtaatctatcatcatagataccgcctacaatcttaccacgataataaatgacaaattcgcccatcatagctcgataggtaatttcattcaagccagataactgacctaaaataaattctaaatattctttgctggatgccataactttacctcaatttctaaatttattactgacttcattatactttattgcttatcgaaaagatagcatattttatgaaacttgtcggctgggaacagcttgcattgcaaggtgtccccagatggcaagtccacaaaagggtagctggcggcagccagcgcaggggaagcgtagcgtcccctgtatgatttggagcagaccatgactgcggaaaatcacagccctccggcgaggagccttcggagaacgtaatgcaccaacctctgggtggtgtataattgcgctcttagtaaactaaggggtttccggcttctcccgttccagcatttttttcaataattcctgcgtgtcctgtctgtgaaaaatgagtttcaacaacagcatgacatcatcatctgtcaggcgttccggctcttgcagaaaactttccagcataccgccacgggtacagagccggtgcgtccgttcctttcgggtaagctgctttaactggtgctgcaatgccttttcatcattgatagctttccgcagtttcttttcgcttttctccagctcccggttgagcttttccagctttgaggtatcaggcaagagcagcgtcctcctttcccggtatcagcacataaatcctattcggttctcccacgccctgacgcacccgcatgataagtccggcggtttccagttcattcaaagaacgcttgaccgtcatggggctgcgggacaggactgcggcaatggctgtgacagggaagcagacaaacaggattccgttctcgtcctcccgccctttggagagcatagcgtccaacatccggcagtacataacctttgcgatgctgctgactggaaatcctgtcaacgctctgggaaagggcatacagggcggcaatggtgtgtctatcgtcataaattcaaaattcattctgtgtgttcctcctttttctttgctcgtttggataagtaacgggggcagtcaaccacaatcgcccggaagctctgcttgcacccatgctggcatttccggcacaattcgttgtaagtgacacgcccccggtcattgaggtaaaaggaaagctcatgcttcctctttttactcattctcggcatattgtgtttcctcccgttttagtgtatggtttcggggcgattttcggcaaaattacagccatagagccgcttaaaatctcccgaagtatcagcgatagggtagactgtctccctatcagattgtcgtgtttcggtatcatttcggtgtcagttcgccagttctccccggtgtcgttcctcccctgaatctcacagcggcgtatcgctcccgttggtacgctcgttttggtcagggttcctccacatccctgccaaaagtcatggcactacatcgccggggaagcatatcccacacaggctggtcattcgattggaataatccatcgatgaactacctgtatcatagaacatttttgtaccctgtgccgtatgtccacaaagtaggaattaggggtaaaaatcagaaatttccacgattgcggaaagtatgatataatccagttaagcggtagcaatgcaaccgccggaaaggagcgtgtgcccatgaaaggagcgacaagcatacaggaacgcctttgggaactccgcaaggacaaaggcttaaatctggaagaattatcagagttgacgggtatttccaaatcagctcttggaagttatgaaaaagaggattataaggaaatcaatcatggcaaccttatcacgctggcagacttctatggagtttccgttgattatctgctgtgccggacagagcacagggagcagatcaacacgccattgacggagctgcatttgaatgatgagatggtcgcacttctgaaaagcggtcggattaacaaccgtctgctctgtgagcttgccacacataaagattttatcaagtttcttgcagatattgagatttatgtggacgggattgccaccatgcagattcaaaacctcaatgcacttgtcgacactgtccggcatgaaatcattgaacggtatcgccccggcgaagatgacccccatttgaaagtgctacaagccgcccatatcagcgatgatgaatatttcagccacatggtgctggatgatctcaacctcattatccgggatattcgggaagcccacaaaaaggatagtgaaagtgccccacagaccaccgttgccgatgaactgaaagaaaatctggaagcggtcgaaaatttcaagggtagtcgggatgaaaagctggtcatcctttattgcaagcaactcggtatcaactataaaaatctgtcggaagaagaattccgctggctcattcggattctcaaaaaatcaaagaaaatgggaacgcctatcagccagaggaaaaaacggtaacaaaaaaccgctgttgcatggttgtgttagcttccatgtagcagcggtttatgctgtggttattcagttgaaatttcagaaagacaggctggaatttatgaacttaatgccgttaccaatgataaatatctttctgtctttttcttaatatcatcttcactaacaccataatagatatacaaatcttttgaaattttctcaaactgtttcattactttcttgtttccagaataagatataccgaatatattccaaatataatctatctccatctcaagagaatcatcaccgattcttatttcatatagatgaaagttcataggaattacattatctggcatttcggcaatcatttcgcttcgagtctttattttacaaaaatattctctgacagattcttcattagaagcatccggctttggaatatccttcatttcacctaaaacttctggtttatgctgtaaaatcaaactctcctttaggtttttttgttgttcaatatattttctctcagttgaattagtttcaattagattgtaggtattcattgcatattgtaccaattcatcaagagtatgtgaatctgcaaccactttcttctctactatcttacgtctatatctgtagataatatttcgtatccttacttttagaggctttttccgtgttctgccagctataaaaatacttgttgggccatctgcaccacctattattgaaacttcacttttgcttttttctttcataagtgttcatcctcgcaaattggaatttgactaatcctacatgtgcatcatattacactcatgtaattatcctctacataaacagcttttccatcagcaagcttaatctcatctttgccgttcggtaatactgttgtttcagaaccattccaatgggggataataggattgtcaataatatgtaatccatctgttaaatttcccgccgcatacatacttcctgcactgattccgacatatataagtccgtttttaattgcattattaagtattctatcaaaaccagttctagacatttcacgacaaagcacagatacatcaccaccactgacaaaaacagcatcaaattggtttaattcttcaaaagttaatagccttgtaagcataaacggggttgtaacatacgaagaataggttctttgatagtcttttgaaagaattaattccagattgtacactaatatattttcgtactgaattcccattagaaagagttcatgaaaacatattgcaagcgactctcttgcaccatctgtttcaatgccagctgttggaatataaagcactttcacatccttcggacactttccaataatatcaaagaatttctctttcatcttatcggtcaaccctgcagatgtaagaaatagatgttttccattcatattcttttacctcgtcaaatctcgattgagatttcacctgttttagggaatttaataactgttatattttgttattaaattctctgcaaacccttgaaaacactggatttatcgcaggtgagctttcccttattgtttcccttgtgttatatcgtcccgtcagcgtttacgaactctgataagggcaaatacaagggcaagaaaaatctataaaacagtataacacaaaataaaagtgacatggtgaactgattgaaatgcttctgatttttgtaacaaatgactgattgaatgataaggagattctatacgatgagaacaatatttgcagaatacaatccacacagaaacagcattgatatttatacttctgctggttatatgctccgcattgactgttgggaagccgaaaaggatttaaaaaccacacccggatcagactgtgcattgaacgcacttgccattgataaaccgcttgaatatgcaaaattatatcttgatgaaacaatgcagatatgggtagatgcagaagattcattagaactatggtgattttttcaacagcactaaggttactttttcccaatctcatttattgagaatcgtctttttaccgtgcatatatattcaatatctttttatctattataatgaaatcaagggctggtctaatgccagccctacaaaaatgaaaattcacatagaaaataaatttacaatttttccgatataaacctgttatcaacaaatacaaacataatttatattatcgtatctattgatatgatatgtatttcaaagagttaccagaagtttttgaaaacttttcccttgtgatattatctaaagctcattcctttagataactataaaacaacgaagcccgttagcccttgtggttagcgggttttcgctgttctgtacttgttgcaaaatccgcttcggtcaaatctcggtcaaataattttctaaagaaatgttgcaccttttctattctctttcttattcttgttctgattatatgatttccttatacaaattctgtaatttatccatttccgattttgctttatcatctgtgacgtgcgtatacaaatccagtgtgattgctatggaataatgtccgaggaatccttgtactacctttgcgtcaatcccggcttcaaaacaacgcgttgcaaaagtatgacgaagtgcatgtggataaaaatgcggaatcggtataaacactgtcttgtttttctctgcctgcttttttcgttccttattgatagatttttctatccagtctaacgtcacttgaaaggtgtgttctgtaatcggttttccgttctttccaacaaacacaagattttcaaatccctctaatggttgccattcactagctgacaactgcatttctttcaactgaatccactgacgttttaaagccttatacacactgtcctgcatgggaatcgtccgtatactgttctttgtctttggtgtctggtacttgaatacatacttctttgtttccttatctttgatatacaccaacgttttatttacagaaatttcccgtttccgaaaatctacatcatcccatgtaagcccaagcagttctccgccacgcattcccgttccgagtgctacctgtatgagattctcgtgtattctctcctttgcgtgttccaatacttcccgttgttctttcacagtcagtacccgtatctgttttgtctttgttttgggaacttccactcctgcacatgggttgaatgtaagaatcctgttatgcactgcatatttgaacatagcattgagaatattatacacatcccgtatagtctttgtgctgtaatcatcatctgccatattctgaagcagacgttccaaaataatcggattaaaatctgccacacgttgttttcctatctgcttctttatgtaacgtctgtaaaaatcatcataacgtacttgtgtactctccttgatagtccgcttcttatgggtattcagccagatatcaaaccatgtatccagagtgatattatcgccctttcctttcaacccatgcttgacttcatagcgtaaatcttccatttcttgaactaacttttttaagtccgcattatcttttgtatacgtttctcctttgtaataaaaccgccctctgtaaattccgctttttctctgcataattcccggcggtaatggatttccttttaagtccttgcccaatctgcacgctcctttccgtgcaaggactatcagaactggtctgacagtattatatgcttatttgtgtttatactgcaattacttcatatttatttttcagattatgcccttcgtttttcttcaaaaactggtctaaaacctcagagagtataagaatcttatttccaatccttatgaccggaatcttctgccatgtaatcagctttcgcagattatttcttccaattcccgtatactctgacgcttcattcactgtaagggctttctttgtctgtatcgtgttctgtgtatgttctgtcaaagattctcctttcttcttccctcaaaaggaaagattttttatagtcctcatatatgcgttgttgttcttcgttcatctgcccccgttctattagctggcggatataatctctgttatccagttttccgattttatccattagctttaaagagggcgaaactgctacgttcagccactgccatgttcgttccagtgtctttttctctggattcatggtcaactttatcttccctacatcctgcatgagttcttcccacgggggataagtaggataaagccgttttcttgtaaccgtgctgttttccggcttctgtaaaaaccgcactttctcgtttaatacagacaacgcaatccgtgccacatccctgtctttcagaagttcttctactaatctgaccgcttttttgtgccggaatcgaagttcatatctgttccagtccgggttgagttcttttccgaacttttctgcctgttcatatcccttttcatagaatgtaatccgaaaatcactgtgtttactgccgagatatagtgtttttccctgcgcttctatttcatcctctttcagtctatcagaacgattctctgctgtatcacgcaactgactagatatcagcccctcgtttttcagacgaatcaattccgggatagacagataaggctttgtatcgtcgattgccaagtctatcctcggaaaattcaccgggtatctgcaaactctttccagaaaatcaaaccatgtttccttattcatcataaggaaattttcataattcctgcaccccgaaccactcataagaatctgaaatccctcatactgtgcatttcctgtcggtttcagaatcttgatattgtcaaatcttgctatcagttcgtgtccagcaattcctttttccttaccatgcagttccataaaactcagtggaatccgcaagatatcttctatgattatgaacacgtctacacctttgacagtaatctgacaccagtcaatcagtgctgtcaaatcttctttctgacgagttacccccctgttagtataggggggttctgaaattttcattacctctgttatcatcatccctgcctttcgtagtatgccgtggctttcgccacgttcccggaacttcctctactccctttgctcctttcacgctgtacggagcagtccgcagagaatttccgggaacagtctctacacgtttccttttccggtaacaacacggatacccttgcaggagattctgtccaccaataccgggaagtttcctctctgcacataaggggcatataccgcttcttctagttctaccactgtgtaaggctctacctttggaagttctgttgcttccagacggatatctacgctgtttccaagtttcatgcttccgaggtgaagtttcaatgcttccacttcctcggttttcttccgggtttccttatcatacttgtagcagtagtctgctcccatgtaacggagttccccgaacgcttctctgacctgttcttttgtcaatgtaatctgcatgctacatttctccttttttgaaatcatggtgaatgagtgtctggtaagtgtgacaagtccttttcatatccacgtctatatttatttcattacttttctccttacctcttaacctcatcatagacctgttttttcttcttgtcaacaattattttactttttcccttactttttattttttgtatttcaaacgcttaactatatctttttataacttattataattttacccttacatttatccttatcttgtgttatgatgaaaacagaaacgaggtgtgcatatgtttgtgaataaagaagcagtaggaaaacgaattttacagatacgcaagaaatacggttacagtatgcagaagtttggggaaatcatagataatgccccgaaaggctctgtaaacagttgggaaaagggtgtgaatcttcccaatgagaaacgcttgaagcagattgccacgttgggcaatatgacgctgaatgaacttctgtatggttcatttaaagaatatgtagatatgcttatcacagaaaaactggggattgaactgccggaagaatttaccagaactttctattctcttttagagcagaacggatttacctacggggatgatatcgagattgtccggcttgtaaacggctttctgacttatcataaccttacaacaaaagaaaccgccattttctatcagccaactgcatactccggcgattattttgacggtatcatacaaaaagcggattcttccgttctggtctgccgggcatatgcagataaggcaaacaacaccttacatatcattccggcttttgagaatggacagactgaggaagtagcagacttctttcatgcactgaaaagcataaccgctccacacaacaacaattatttcacttccggctttctgacactcggactggcattgagagattccaaagtaattatctatggaattgatgaaaaacagggaacaacacaggtaatcccttacgaatatgattgcgaatcagacgcttatatccagaatgaacatctggcatataccagacaggatagctttttccgagaagccacgaaagaagcggtctatcggaaaatgcaatccgacagaagtaacccataagataaacaagaggacttgcaaggtttgtgacctttcaagtcctcttatgtatcatgatggtattggctgtgtccgttccgtaaaggactgccctacggcgtctcggcttcgccttgttcctttacctcactaataataatgttctgatagcagaactcttacttatacttttatcttactattctttcaatttttaccgtttcaccatcaatattatacttaaaaaaataaaatttaataacatttccttctgatacttgttctagatcacctttacacttagtacaatctaaactaacttttgtcgtatcaaaaaatagactactttcttccttctcatttagttctattaaaagtgtatcaaaagttttctctacaacaaccccactcaaatgaaaccaatgagaattatcatctccactagaacgcaactccatattttgacgattctccttaaaaacatttccttttacgccaagcacaattaatactattgcaagcaaaagtatgattaacaaaatcaatcgtttcttatccattaaatgtagtccccgatatgtctgtccaactatcaaaatcaaaattcaaataacgtactgtatccccccatccatcaaataccatcaatgtatgtactgtatttccagaattatatgctcgcaaagttgcatatccctctgctgccattgaatgccccgcacgttctccagtatcactgctaattataccacaatggacaactgctatatctcctctatcaatgcaattagtgaaaaaattataattgggactatagtcagtattttgtgttacagaaacattctttccagcacaaaagtccacaaatccaggtccaatattgccaatagttgttgaaccatatgttattcctccactctccgatgaaactgtcgttcctgttgaatcccaaatatccatataatcacctgcaatatctgtataatcaacagcattataatatgcaccacatgctaataatgcactaactgcacatgcataatgtcctgttacactttctatatacggctcattaaaggaaataaattcttgaagatgatttgttgaaacaagcgtgtagttttcataaacttcatcaatatctagcaaaacctcatcccaagtagctgggtcttttcccctactctcattcaaggacagtactgttttttctaatgtttcaccataattcgttctaatctttcccaaattatcaacaataccatattcaaacggagctattttatatatttcagaggtatttgctttttcactaaatacatttgcttcactttgataaatcacctcatatggatttgctgaattattaccaaatgagtattctgatatcaaagattcacacgtagtatcaaaaactacatatccatatggtttgttttctaaattgtaatttacaatatatccaatagcttgacctgttgtatcataaaattttctcggattattagcaacaatattgctattttctcctattccctttgcaaaacgttctgccatctgtatcgccaaatcatccgtaacatttacaacagaagtattctccgatgcatggacaggaactattgacataatagtcaatataaagattgtcaaaagtgaagcaaatcgtttaaaaatttttctcataaatatccttcctccttagattatatatttactttaatattatatcttattccctattttgtctatatttttttatgtttatttcaaatatttcattctattttatttttatcaaactattttcaaacaaatccaaacaaagaatctcggggcaaatttcggtcaaatcaggataaataaatataacactttatatgtaagtcaattttaaaaaagcctgtaattccgggctttacaacactttgtaacacaatataaaccagttcgataatccctcctaattttatacttttcccatgatggagcagcttatttgaccgtatctctagcaccaaagatgttgtattctatactgatacatcaatagaattgcgaactaacctattaccatttttgacaagcgtagattccactgattctcttgtaacgttatcaagaatgcttgtatcaaacttttgtcccggcttccaatttggattagccgatttcactgctgcatacatagcagctctatactgtccttcgtattgctctaaagtccatgtaccacttaaacgtttgtctttacttacgcttaactgataatccttaaaaatatctgaacgcttagttgtatcaccatttgaaagaccgttttcctgaataaattccctcttcacattatcaaacatcttttgacgatattcctcagatacacttgtgagttgctgccacgatgtacctttgccggtaacatccattcctgccactccatttgcattcagcaaatcaccttctgaatcaaattgcttcatcagattattaataatggtatctcttccaccgaatgtttcatatatcattctttcttctgatgacatcatggcttcattttgcataatacctgataaccagcccttttctttcaaagccttatattgtttactatttgtgttgatgccattataggtattgcctaatccgctgatattcattgacatataaaacctccgtgtaaatacattctaaatccgtttgaattaactctatgctatatagtatagatcgtcataaatctccaaaaaataaaggaacccactttattaagtatttttgtttttagcatatttctaaagcacagaataccattgtctgttcatacgatcagcttcatactggtatgtaatcaactggttcatatcctttaagctgctctttccatatataatgcttaaagtcatatctggcacattgttccatcctctggttgaaatagttgaaaccaggtcatgtatccaattattcatttgctgcttaaactctttcggaacttttccggaactttcaactgcactatccactaagtctaatatattctctcccgactccgtataatatgtcccatttttttcctcaagtttgtctaattcatatcctgtataactataaacctgatgatatgcttcgtatttcatctttgattcctctgttacttgagaactctcacagccatcttgtgttgagcaataatagatatgcttatagagatttttcccattattacctacatttaaagcattctgcatcaacacctttgtttcttcatccacaccatctaccgttatctcgtaactgtatggatcgacagtaaaagtacactcttccttaatagaagatgtatctacaccagcctgctttaaaatatttgaaatctgtgaatttaccaatgctctttcaaattggattttatccgaatctacactgtcgccgtctacttcaattcccctgaacaaagaatcctgataatttacaccatttatttttcctgtccggcacatctgcatctcataattatatgcaatcctacgttctgtatcagtcaaattagtctcgtaatactctgaactcttatcaaaatacttggaatgaatataattttctgggttagaatgtgtttttgcttctgcggcaagcttagaatacttttccgttaatgccgccctaaatgctttacctgtactcatatattcacttgttttcgcattaatctgtgttcctgcattctcaatgagctcttgattcgttttttttgctgaagctatataggactttaagtcaatgctgctgtcaatacttgtgttatgtgttcttccacttgtactttttgtcagtttttcctttcccgatgcacttatcgttaaagtatctcttgtgcctctacaaccagtgttttgactgcttgccgctttttgttgttgaccaaacagaacattaagcaacgactgattagcattaattcggctgttaaaaaatatattcataatatcaccaaccttcttattatatatcggattatcctaaccttgtttgtaatcttttctttcttcaaaattatagaaattgatactatgcatatgtatcaaaacctaccttatttttagttgtcgcttctatagcaatcatattttctgtttttttatcttctttttctttatcctctttcattctctccagccatttgtcaatttctgaatccgtaccagtctctccaaaaatgccacaggttgtcatttcggttccattattcgtaaacttaaactccactgatatcagtttactaccatgacttattgccgccttctgtgcatttcgtataacatctggcataattgctaaattttcctcaagccatttcgcagttttttcatctccacatgcctttctcattacacttccgtcaatcaatacagaagcatttttgcatgtaattaaaaaaattacaaatcttatgcaaacatacaatatctacctaaattatcaactttatatgcattattttcctgagtggtgccataattatcgccataatatatctttattcctttcaaaatttttgtccatgcacttatgtctgcacaatcattttctgccgccaaacattttctggcagtagcataacaggaacccggcatatcaatttcccatgctttgctggaatcaccatcatacggaatatatgtaactccattaggagtcaaaaatgtaaaaccatctttttcgcgtttcagatttcctgatatctcaagtaaagcatataatcctgccgtagaccgctgtgaacttaccggatatttttgaaattcatcagctaatttattcagcgtctctatatctttatcggatgttatgattaccgaaactccttgtgcctcatttccctttatcgacaaataatttaaccctgtctttgaatcacggtttactaccaatcccccctgtagcggtatttcctttatatcaatatttcttttgtcagacaaatcattcaaaagatttttcagttcacttgtcatggttacattatacgaaaatggctgatccatattaatcaggaactccattcctgttttctcatctctttgaattgctaattgatcttctcttatataaaaatcttttcctgcctgcttatctacaatctcatatgctgctactccatttacatatgtagcatcttcgattttatatctttctgtttctattggtaattcaacatcttgagatatgctattttttgtataaattccaaagttattataatccataccattcacataggaatcccttgtgctaaccttattacttatactctctctgactttattcattgcatcagaaaaatttcctactgcatttctattatttttttgaccacacaacctgtcttgttttaagtaaccactctctattctcattattttacctctcaatttcattattcttcttaaaagagggaaggaaaatctatacctattccttcctcttaaaacaagactgctccaaagcactattcaagatttacaccatgcctaaatctcaatttcccgctttataccatacttcacattttgtgttgttccaactgcatacccacttacagtaacagtccaagtgcctgatccgatatcatcagcagtataaatccatgtatctgtcgaataattagcgagctgcttcgttactacattcaatccgcttctgaatgttatcgtaccctgatacaaatccaaattattgtttttaggtaaatacacatacagctttgaattgttgattaacgtaacacttccaagtgaaacagtaccaccgtttcggtaaattgttcctgcatatttagcatcagacggcacacttgcaaccattatttcttcagtttcagatgctgccggttctgctgccattaccggaatggtaaatacattgagtattgtcaaacaagacaacaccattgctaaaatactttttttgagtctcatattgcttcttcttctaatattttataaacaaaattattgttcatccaataatttgatttcagtctttgttttcttccctaatttcatatggaactcctcctttcttcaaaattatagaaattgatactatgcatatgtatcaaaacctaccttatttttagttgtcgcttctatagcaatcatattttctgtttttttatcttctttttctttatcctctttcattctctccagccatttgtcaatttctgaatccgtaccagtctctccaaaaatgccacaggttgtcatttcggttccattattcgtaaacttaaactccactgatatcagtttactaccatgacttattgccgccttctgtgcatttcgtataacatctggcataattgctaaattttcctcaagccatttcgcagttttttcatctccacatgccttttgcattacacttctgtcaatcaatacagaagcatttttgcatggagtcaaacatttatacttgttagtcaaatactttgaatagtctgatacatttttaaacttattggctgaattcatagtgtatcctgcataataattcttttcactattctttgatggctttacattttcattttttacatttccgtatgtgtatgtattggcatacgatgatactccattaattcccatactgtatctctcctttctatttagccttgattttttatttgcaggctattgggttttgttcgatacgcttactgccattgtaaaatttgtctcataagaagctactgcctgacttattgtgacagtcttagcagacgaactactctcagccaccaatcgagttctggcatcctgagcggataaccttttattttgcgcatattcttcataagctgttctttccgcttgttttttctgaatccgctttttttcctgttgtttctttacctgattttctattctctttttattttctattctgcgctcccaaaaactattttttgacttatcattaaaaatcttcccaccattcccattgttataaccagcactccacatctcagcatgacattcttcttttgatgctccataatatattgtagaaaacgctcctccgcatataccggaccatttatctggttgtgaccaacccacttgcaaatcatttaatacccatgcttcatactctggatcattcttcattgcttcaaaacccgcctctgaaattgtaacagatattgactcgcctgctcttgtggggtgcattggaatttgagatattttattgtaaatgtactgcttgtattccaccatcgtcatatctttagcagacacagaacctatttttgaattgcccactatacttccactagcttcgctcttttctcttacactatccgcaaaccttgtatcttccttctcctgatctttagccgcatttttctgttggtactgattgtaagcccgtgtcatatagttcacattaattgtattactcatagtaacctcctttgctttctttatcggataaaataacctgttctcctagtcccatatcatcaaacgaccatattacgcacacaaagaccatatttttacaagatgaccactgccttagtagaagctctgtatctcaaactctttgaaatacaatgcttccctgcattttctatatcgtcatgttgatattattactttactatcctgcacactctctgagagtgactgtatctatcaaaaaagaagccagcagtttattcacgcactgctgacttcttataatactactcattttatttacttcgctgcgtctcagacaatttttttatttttaaacataacctctgttttcccgccatccctttacataccacctgattccaacatataccagttgcacgaataataagagaaatagcagattgattggcaatacttcctttatccaatccccaaagtagatagctattgccatacttacaagtatcaccattatggtaatcatatcccaacagtatttcttatatagccctgcaatctttatttcgatgaatgccaaaagtattcccacacccaccagacatccaccgcaaatcaatattcttatcagccagtttataattccagcaacgacaggattggatattccatcactaatctgtgccacgttctttcctgccagtacaacccagccagcaatggtctgtgtgaaagttgcgattgtatcaaagaataccacgcaatcagaaataaatatttttgaccgtatcatctgaaaaagagtagttgatatggaataccatatcaacagaaatatcaatgcttcatacatgactgtttttgctttatatctgcctgccagtttttctctctgtgtatcatacctttccttcgctttcagataagctgtctggttacaattcccgcacttttgatagaataccggcttttcaaccggtatctctacttttttctgattggagagtgcataatcccgttcctgttctgcctgccttagcttatcttgacattcctctgtcatgatttcggcagcgtgcgttttctctttctcgctctgcaataattcttttgttttcctcaagtcgttctttaaggcttgaatgttccctgctctgttctcgctgtttaacctctcgttcaaggtcagcgattcgtcgagctgcattttcagttcccggatagtcctgtctttctggtcgagttcttcctgcatctgctctgtcagcagaagcaactcttccagttgatcgtcgctctttgagtttcttaattcgttcatcaatcgaccttcctttctctaattgctgttcaagttcagtaattcgctgttctgtttctgcaatagccggttctcgctgtttaatttctgtgccaattcctgccattgctgattttcgtctgtaagcttctgtatctggtctgtcttttcttccagaagtatcaacagttcttctgtatccggcaagatttgaagcagttctgataattctttctctaattgctgcaatcgttcttcctgctcctgaaagcacatcagcttctcgtccttttcctgtatctcctgaagcatctctgccatgatattctgctgttcctcgatctgtgtaatcatttcttccatcatgggaattacttctttgctttcttctaatgtcattcaaccactccctccacatcgacaatgcaccggacaccttaccaaaggttgcgattacctttttcagtagtgcattttgttttttaatcatctggttttcctctaccttccatgaacctttccttatctgtccggtgagatattttttctcaatcttccttgcatctgcaccctcatggatagtagggacttttaattttccctgtctttcataagagcggtggtcaatctgattgtctatggataaatgtcggttacacatctttgcccattcgcttcgccataactcacaattttttggattgttccagccggtagcatcggtcagaacccgtttccattgttttctgtttcttgccccgactttctgtactccgttttcatcaagtaccggaatacggattccatgccggtctggatttttcttatcctgccaccagtcagggtgggattcatcaaccacgatatttccgtcagtatctctgacaaaatcccagtccttgacttctttgttgccccatgagtgatccggattgaatgatcgcatggttacaagtaaatgcacatgtgggtttccatcgcccttgtcgtgtatgctccagtcggcacacattcccttgtccacgaaagtcttttgaatatattcggttgtataatcaatctgttcctgtctgctccattctttcggtaaggaaaattcaaataagcgtccaagctgtgcatctgcatttttttctatcttcaagacctcattccatagccgctgtttctgaaatgtgattttaaacttttccagtgcggcttccttatcgtccgctcttttataacggatagactgttgaaacctttttatattttcttccggtacatgcagccattcaggaggtgcattttcgcacatcatcagactggtgtagacaacttcctttttggaagtatagtaactgatcctgcctgtttcctcattcttcatcacatctccattaagatatgccgatgtggatatgacagattttcctttactgcgtccgacaatctttactgtaaaatgaaatatcgccatgatacgattccccctttctgccgtatccggcattgatttccgacagcatcttcttctggtttggcaggagtgaagctgtcggaacgccctctgcgcaagagtgccccctgcggcatgagcaggtctggctgaaagccccgccgacggaacgagcccggcaagcgtaagcgcagaccggttgccacttgtggcaaacttataaggacgacctctggttgtccataagtgcgcccttcattcaaaggcaatgaagggaatggaaaaaccactccctccgccattacacttcctccatatctgtaagtggctctttctgcatcgcctttgagaaaaactttccgtttgtttcctgcctttttaagaagcctatcaactttggtaaatcttcctcctcaatcggacagccaagaaccgattccaccgcaccgccaatctgacagagcctgtgggttcgttttttactttcctcggctttctttctcttttccagttccttccgctgtgcaatgagctttttggtagcttcgatgctttcctgttcctttttctctaatgcacgtattctttcttcataagtctttgttgatttcgccatatcgtcttcatcctttctcttataatcaaatcttgctctgctaagatttggcacacgattctggtcagctctgttgacataattccaatcagaatcgtggtgcatccttgcggagcattatcttgtcgatgtttttccgacaagataaacattagttcccggttgcatatcaggagaagcacatggtataatcctcttgcgtgtaggtatatcatggcttcggtctgatagaacctttggcggtttcgtaggaagccgcctttttaagttgccacatttcttgtgacagtttttacatttcctttatccctcagatctcgcccctcgttggcttccatgaacttttccagaatgtcagttttaataaggacttttcttccgacttttaataccggaagtttcttccattcaaccagctttctcaaagtgtttctgccaattcctgtatagtcggctgcttcctcgatggataatgcaatctttctttccgtcatcttgtcacctccttatgaattgcattatagccatgagcaaaactccacacattcagtatttatgcgggtttgcgaggcatggcaacctcttttatcactccaaatttatagtaacaatcaactccaaatggtataattaagttgtcaaaatcaattcaccgaaaggagctgattgttatctatcgtcaagaaattttgaaagacatccgtcttttcacttcacaaccagttgcaaagttttatgattctctttttctgaatcttgatttatcctttgttccggaattccccaaaacaggaagaaaagggttttcaaaccacgctatgatttgttcctttattgtcatgaaatgcgaaggtttctccatgatttccgatcttgtcgattatcttcacaataatcttctgattgcgcatttttgtggctttgatatttctcgtccacttccttcttattggacttttgatcgcttcttgaaaaattttgataacaaagttctctctaaaatcatgaaaactcaggtgctattcctttctaaagaaggtattgtagacacttcttttattggcttagattcaactcctgtctctgcaaatacttcacagaataatccgaaatcttttctctcaaataagtttaagcccggaaatcaaccaagggcggattcagattgtagactcggcgtccacactgcatccaatcaaacgaatgagaaaaaatatgaattttattggggctataaaaaccatgtccttgtagactgtatttcaggtcttcctatttatgaaatgaccacaaccgcggaagttcatgatgctaccgtcgctttagatatccttgctgctacccattcctttcaaccaataacggactgcatattccttgccgacaaaggttacgatgtcaaaaatatctacaatcaggttaaggaactttacaatggagaatgtatcattccattaaacaaacgtaataccaaaaatccgaaacttcttcctcaagggaatcccatttgcgaagcagggcttgccatgtggaaggatggtaagttttccgattgtggtcgtacccgtcaaaagttttgttgtcctctaaaatcaagtaaagataccctttgcccatgccaccacaaaaatttctataatggtaaaaagcatcgtggctgtacgagatatctcaccattcctgatgatttaagactttccattgatagggacagcaaatattttaaaagtaattattcactccgcacagaatgtgaacgctataattcgcgttttaaaaatactggtcaagagcggatgtgggtaagaaataaagcatctgttacaaacttaaacacacttgcccatatcagtttactagcagttgccgttgccgcaatcactagccattctggtcagtcttatcgcaaactaaaaacaataaaacgaattgcttgattaaaaaattctcatagtcttatgatttcgtaagttttggacttacgttagctttgctatgccataaaatcgcaacctcaaactttatgggagctaactgccaagttctacttttggatcaatatgttttgctcatctctaattgcattatgcaatttttgttgtgctgttagtatagcggttttatattgtgttgtcaagcgttatgaaattttaaaaataattattatattgcatattgcaattatgtgaggtacatgctataattcatacataccgaaaaaggaggcaatcagcatgaaagataaagaactacgcaagctgataggcagcagggcaaaacagcgtcgtctggaattaaatctgacacagccttatgttgcagagaagatgggagttaccgcttccacaatcctgcgttatgagaatggttcgattgacaataccaaaaagatggtgctggaaggtctttcggaagcacttcatgtatctattgaatggctcagaggggaaaccgatgaatacgaaaccgatattacggataagaaagaattacagattcgtgatgcaatgggcgatattctcaaacagttacctctcgaccttagtaaaaaggaagatgctttttccaaagatttactgctgttgatgttaaagcaatataacctgtttctggaatcattccagtttgcctgcaagaattacaagggcaacacgaatgaagctgatattgcaaaagtaatggggtttgaatcgaatgatgaatataacgagattatgtttctccgggagatcacccacactgttaatgcctttaacgacatggcagatatcgtaaggctttattccaagaaaccggaaatggcagaacaaaggcttgaaaatcttttatcagaagttttgtatgaggattccgattcggtatagaacgacaaccggagttatgatatacttacacgcaagaagcatttcatcagttccgattgtctgatatcgaaaggagacacacgattatggcaaaaggatctgtaagaaaaaaaggaaagaaatggtactaccgcttctatgtagaagatgcaagcggcaatctggttcagaaagaatacgctggaacagaaagtaaaagtgaaacggaaaaactgctccgtcaggcaatggatgattacgaaagcaagaaatttgtcgcaaagacagataatcttactgtaggagaacttcttgatatgtgggcggaagaagaactgaaagtcggaacactcagcaatggtacagtggaaaattatcttggtgcaatccgttgtatcaagaaacatccgattgcagaacgcaaattaaaaaccgttactgctgaacatttacaggcatttctcgatctgcttacattcggtggggaatttccagatggaaaagtgagaaaaggatacagtaaagattacatccattccttttcagcagtattacaacaggctttccggtttgcagtatttccaaaacagttgattacttttaatcctatgcagtatattaagctgaaaaaacaggcagaggatgtggatttattctcagatgatgaggtagaagaaggcatacagcctatttcccatgaagattatgagagactgatagaatacctcaaagtaaagaatccacctgcaatcctgccaatccagatcgcatactatgcgggacttcgtatcggtgaagtttgcggattgacatggcaggacatcaatcttgaagaacaatgcctgaccattaaaagaagtatccgctatgatggcacaaaacataaaaacatcatcggaccgaccaagcgaaagaaagtaaggattgttgattttggcgatactctgactgaaatactgaaaaccgccagaaaaaaacagcttaaaagccggatgcagtatggtgaactttaccaccgcaatttctacaaggaagcacaggacaaaaacagagtgtattatgaatattatcatctggacggaaccgaagaaatcccggtagattacaaggaaatctcctttgtctgcctgagaccggacggatgtctggaactgccaagcacactcagcattgcctgccgatcagttgcaaaaaggctggacggatttgagaatttccatttccaccagttgcgacacacctacacaagcaacctcctctcaaacggagctgccccaaaagatgtgcaggaactgttagggcactctgatgtcagtaccacaatgaatgtctacgcccactctacaagaaaggcaaagcggaactccgccagacttcttgataaagtggcaggcaacgactaaataaaaaattcccttatttcccttgctgattccgcataaggtcaaaaataagggaaaatacatatcatttcactatttaaggggctggaaagcccgtaaaataaggaaagttcaagaaatctctccacaaactccgatttatcataatcattctaccataccgttatgaataaatcatctcatgcaaaacaatttcttctgcccgattgtgaatgttattgcaacgctgcacccattccatctgacagatactctttaattcttctgtgaccccctcagcagctttcatctgctctatgattgtatctaatcgcttctgtgcctgttcgttcagatctgcaagatatgtccataattcccctgtcagggtcaatgtattcaatctggctgggtggacttctcttaaatattcccggtgcatccgtccgtactttccgatagggcggtgttcctccggcaatttcaaatctggtaaataataatctccattcagagtgtaatgcagtccgtttttctcttcataaatgtgtttctttaatccgctcatatttttaatctcctcattctggtttgttgtttctgcaagtctgactctccagaaatattggtaaatcattggtaaaatcgagaattgaacacaagaaatgctatttatagaagtatttaagacgatttaagactttttctcacgaacagtaaatcctgccgtggcaaaccatgagcactttaattttatcttgcatatcttcgtttttccttgtatatccttatttttcctaggttttatcacactttcacgacatctaacctagtgtacctatcctagcataaaatcgcatattttaccatatctcggtaagtaaaatgagtacaaatctaggtataaacccgattcgtactcattagtactttttccctatgccatttatttccttacttggcacactttttctatcctttcaagcctctccatttctctctgtgcatcttccaacttaaggtgtgtatacacatttgaggtaaagaagggatttttatggcggttaccaataatatcagagaaatccgagagcagcgtggcatttaccaggatgaccttgccgctgctatcggatacagcaccaaaactgtcggcaggatagagcgtgggaacagcaccccatctgccgaatttatgctgcgaatatcaaagtactttaatatgctggtggaagatgtcttccatgtagaagattgagtcggagggagcaattctgtaacaaagcaattttttataacaggcttatttcgtgcaccctttttacttgggtggtgactgctaaaaccagaccctatcgaagaaccctaaaaaactatgctttttttaatgccagaccctatcgataaaccctaaaatagattggcaaaccctaaagaactttgattatccgaaaaatctcggaagccttaattttactatatttgttatcagaaggttgttctgctcgcaacgctcacagaacaactttctcactaactttgcgcttacgcactcattaagtgttcaatgattactcgataactgtagcaacacgtccagattctactgtacgtccaccatcacggactttggtttcgtgatattcgattatttgaaactaatttgtgcggttctgttgtctaaagtagcttatttttgctgaggaattagtgctttataaaaatcttgtagccaaaatgtagccaattaacgtttagataagcacaggcaaatgaatttcaataattctttcaaaataacataatcactttaatataaataagttatgttattttaaaatatatctgccttcttctttatatatttcttgcttaacgtcaacacaaaatgctggtctgataccattcatatcgtatgcattcgtgcttccaatttcaccttccggtcctactgcatatacacaagaatcatatgtagaatccgcacttcttaaccaccaacttacagtaaactttccattattcgtagtagcaaaacgattcttattatctttaaaatacaacaatggcaccccttcaactccgacatgcccattttttttatatccaagttcagtaaaagacaacaaaaacacttttcttacaatagttatcacgctatcatctatttgattcaagcatcgttcatctaaaatctctatttccgaatcttgaattaagcaacgagtttgaataggtaaattatcaaaaaactctcccattaagtaattatcaatttcactttcttcatagtaagccgaataatcactaactcttctattctctggaagaatttcttttcttaacaaaagtgttttaccattataatcattagttaatacaatatatggaacaaatcctgctttttcttcaatatatatgattggttcaattttacatttttcagaatatgccaaatcacttattgtattatattcctcggttactgcttgtcttttactacaagcatttaatagaactccaagaacaattgctaatactactactttatacgtttttctgaacatttatgtggctccttaatttctctgctttttacgtcttatttttgtaaatgccatacacatcactatacttaccatgattacagccattagactacaaaatccaactgcagattcgtctcctgttgaaacagattctatcttttctcctccattttcatttattcccgaaccagaattattacctgtattattatcttttcccgaatcaggattttctgggttcgctggattttctgggttcgctggattttctgggttcgctgattctccatctttttcaaattttgcaactaaaagggtatctttttctacacaaaaacgatattgtgtttcttgcgaaattaatttatcattctcataccaaccaacaaattggtaaccttctttaatttatgaaatactatatgtcttgtagattcatttcataaattactataatttttatagttttatcatttatacatttgttgaaaaaagttatataaaacattacaatatttattgatataagattctttctcgccatctataacaccacaaaaataactgtacttagaaccatcaaaaacaactgtacatatattagttttaaataagctcatattatcatcattttccatataatagagaatgttatcatatatactatatacattcccttcatcagcctcttcaatagttggtaataaaccttcaaacttttctaacggttcagccgttatatatacttcaatagaagaatccacaagattttcgtcatttgtttcatattcaaatgtatatcggaaataagctccaccgaaactttcatcttcatttaagtaacatcgcattccagaatatccttggtcaaatgcaacatctaccttcgtatatttttcaaaaacatcataattcttgttatcttccaccactacttctttataagaatcatatttcttataaaatgcttcattgacattagcaacttcatttacttggagaaatttgaagttaacttcatttatatttatattttctatgttttcctcataatacttgtcagactttatatattcccgttctttgccatcctttaatacattcttgcctataaaaattaatgcaataaaaaacaagcatacaaataatattcttattattttcttcattcatttctcctattctgtcaatcctaaatctattgattttactggctttgacgatttttattttacctcaaacaaaagccgagagtgatggatatcgtagtgtcatgtaccgaatagctgataaataagtatagctaataaagcatccttttagtttgctttataaaggctattttccctctgttcaactatgatgatgaaccttccgtgtctaaggggatcatgtcccaacttccttcgtagcatctaccattcactgagtgccagccaagctcctaaacgggggcatgccccacggaaaaaaacgatgccggctacagctcttgtttttatgtttgattgttactgacctgcattcacctgtcgtggtactgatttactcagtggacgctataccatctcaggttcttgttggtcttttgcagatgcagtccgttccggactccataccattttacggcttcacggcctgcatccgttccatccgttaatcccacacttttctctgcatagctcgcttctcctgaatctgatatagtcaattctgttccgtatgaggatatataatccatgctttcatgatcgtgacattatttgcaacaaaccattgcggtataactttgagaaagtaccagactgaccgcaagcacaattgaacacataaattttacaatctttgtttttgccatacttttatcctcccatgttttgattcagtttttcttgattccaataaaaacttaattttactagcaagccttttctttccacatctatagttgcataaagttcatcacctccataaacataaagctcatcatcaaccgatttccatacaacatttatatcacttaaattgtaagctctaaatataaatacattttcttccacaatttgttttgatattatttctatgtcttctgtattttttacataatactctagtataaaatcaccattatgcttatagtcatcttccgcataaataacattaccctcaaaataattttttttgcccaaatacaattctaaggagttcattccataatcaaatgtatgatccacccctgatgccgaacccatcattgtacacaatattccaaaaaataccacccaaaatccatagataaaataaaattttttctttttgcattttttatctctatatctgccaaagcacattacatgcgttatctgatgtgcgaagaagaacgttaaaaataatgatagcgctaaatagtaaactttcaaattgttctcacctctcatcatgcataatatattcatttagttattcatatatttctctgtataaaaaccataataattattatacaaaaaaatttaattctaatgttgaaaaatattgtttactttttttgcttctatttgtaaatgacaaaataattttgtacacaataatataaactaaaatcaatatatagtatcgtgaatcacgaactgttccaatagcaataaaaaatatagtagtcaatataattagtattgaaaaaacagtaaaaataatttttttcataaatatctcctatcgaaattgtaacccttaattgcataaaaacgttatacaacaattaatgtgttcattctacttattctttaaatttagttgtacgctttacttacctaaaatatcaacgaatttaacatcattttcatttacatagacacagtataacataattcctgtgcctatgcgatatcatttaatgcttattccgatatgaactcatcttctccacagttacctccgcataaaagtaagtaagaatcgttgccttcggaactcctgcagcaagtgctttcttcacctcttccttctgctccggtgtatatgaccagtgtagcattctgtttgtgatggtatcctcccacttaggcttttccctctcaggattccttacaggcttagctccagtacttccattagacgcattggcactttctgcagcatcagacttctgcgattcatcgacatactcaagctcatttgcttgctccctgtcaatctttgccttctgctctgcttcatcctgcattgagaatcttctgcttaattccgcatcaccaagcatcataaactgctcataggtaagagaatctatatacacattctcgcccttatccttcagtttttcataatacttaactgccttatctgacagaatctcaaatggtggaccgataagattatctgctcccattatctgatgaacataaggctctcccttgccatctgctgtctggttaaacatcggatgattgaatggtatgaacttattgtccatgataggaacaaaaccacggataaagataatacactttttgttatccagctttctgacctcatcgggtgtaaacagttctcttcctaatacatcatagtttcttgaagagcttccctgtctgccctttgtctccccgcttgacttcttatcaatcgtccctttgcccaaaagctccgagacatacttgtgtgtactctgctcattgcctccaagataaatgaaagtatcgcagttgcctggaatggtttcccaagtatctttgaaaagtgcctttaactgggcaaagttctgaatgatgataatacttgaaatctcacggcttcgcatagtacttaacagcgaacagtagtcatccggcaatgcgacattcgcaaattcatctaacatgaatgtcacatggattacctcctgcctcacagtgccaaccttatagaactttccttcatactcaagtacatcaccgaaaagtgccggagttgttgtaatctccttaacacctgtgacaaatacctgagagattgttttcatcattgaccatccatgatcaatgccgattacttctaacttgttattcatgttcctgtctctccttcccttccgtaatatttgcttccatatcctgctcatctgtatcttttctcccttcctcttccataagctgctcaataaatctctctgatctagacgacactgcaaccaatgaatatagaaaaacaaggatgatacttattccgaccaacacaacaatccagcatagcttcatgtaaatacgcctccttctgtagattcttctaagaggcacttacaatttgcctgacattttcgtgccagtctttggaaataaacacatttcaaacattcgtgctctgccataaataatgctttctcatttctggctacaatctttcggtaacgctttttcaaataagaaacatcatataaatcctgcttgatttcattcatggcattttgcttcattatcgctgtgttcagtgaattaatgtagctaacgaacttttcctcagtgcttatatccacacctttaaaagttaattccattcactacttacctgctttctacacggctcatgccatgtaggtgtgcttttttcccatttgcctgcacacataggaattacagataagccgcatatgcgtttacgacgcattaagttaaattaaataatgctatcctctctactgccttttcgagagccaggaagttccctctgaacaccttcatagtttattatccttccgcaacagtattgactacccttactcgctccactttcatttctcaatccttcagcactcttcgcaagtatatttgatttccatcaggtatctgaaccggaattatcactatatctgtaattgttattcaattgtatgagctgctttgcaactcgcaggattatgatatagcaaaattttgattccttgaacttcgccaaaagaagtattttcaacatatctattctttttatgttagtcctcatttgtggtctgttcgtattttattatatagtccacatttgtggttgtcaatatattttcaaaataatgtaccacttttgtgaactctgtgttaaaatattcatatcaatttgtttgaggtgattattaatggataatagacattcaattggaagtaaaattcaaaaatatagaaaattaaaagatatgacacaggacgaattatcaaaacagtccggtatttatttatctaccataaagaaatatgaaagcggtgaacgaaatccaaaaccagatcagcttcaaaaaatagcagaagctcttggcattagcgtaactgtatttcttgattacgatattaatactattagtgatgttctttctttagttatgaagcttaacgaacaatccccattgaaaatatctgctgataaggataaagatggcaactatatccccagcagcatacacatgacatttgaagattcacaaataaatgaagctatttgttcttatctaaattgtaaacaacagatggatttaattgcctatgaggataatgataaagctgtgattgaacagcaaaaagaattttatgatgataagattaacagattgctcttaattaatgaatgtattaaaaaaatccgctaaattgcggattttttctttgctaggactctattataatacttctctttacatatcctgagtagtttatcaactactcaaatagctttggtaaatcgttggtaaaaatctactgtaacatccccaaaacactgtaaaatcaagtatttttaatcaaggttagcatgttgccgtggcaaaccatgaggactttaattttatcttgcatatcttcgtttttccttgtatatccttatttttcctaggttttatcgcactttcacgacatctaacctagtgtacctatcctagcataaaatcgcatattttaccatatctcggtaagtaaaatgagtacaaatctaggtataaacccgatttgtactcattagtactttttccctattccatttgtttccttacttggcacactttttcatttgtcattgtccgtttcagtcggctttgataataccctttttgcatctcttgccatgtcacacagccttgagataaattgtgtgtagtctgcaatctcatctccatccactgtgtatggaaaccatgtgaaatttatttttcatctgtaatttcaatctctgtgctgtccatccgaaatgcacgttgaaaaagtgtctgcttatcctgttgcactggcactccttccgttatttccatatcgccttgaaccccatgttcccgtaactgccgaatcaggtcttccactatttctttttcagttccatccgggatatgcaataccccctccttaattttattccttcataatattcgaaaacgttcctgacaattcacatattttctttgcaatactattttcaccatcttctatttttttagatggtgccgttagttttaattgttttaatcttttttgtattgccattcttccgtagaaaaatctccaacgttgcatattaatttgagctgcaaaccaagccatctcagaatatgacattttatatttcggtatcaaaacccttactgcactaccaccatttcctctagccataaatcgccaaggttgcacacaagcttgtccaaaacaagttactgtaatagccccattttcaaacacttcaccattaacatcattgactagtctaacaatactattttgtgggtctcctgatgatacatacggacatgtgcccgccaagtaattactttcaccacttgattttccacctgaaacagcaaaaaacttctctatattatcagattttccgtatggaagttccggtagcttatcatcacttagcgggaaattcgtgagaacctcatccgcaatatcctcaatacatactgacgctgtcaaaatggattttgtaatattctctacaaatatattctgctcttcttcagacaactctggttgtggcaaatactgttctggtgaaaattcagctccaacttccattatctgtgatgctgatactattgtaacaagttctgattttacctttttatttttcataaacttcttaaacaaatctaatacttccggtaattgtgaaccttctacttcaactcttttgccttttaactttttatatccatcattccaaattttagccataaatatcttatcgcttttcatttgtggtctatgtgcctgtgcaatcattattgttgtatcaacagctgttgggtaaaataaatcacccggcaaactaatcatcccaaaaacagaatgttttttcaaaaattcactacgccataaagcattgtcatcatcagcaaaaataccagatttaacaacaaccgccatcaatcccattgtttgcaaagattccattgctaatgaaataaaatctcgttctggctcttcatcctgagaaaaaggtggatttagcaaagccttcgtaaatttattctttacattttctttgctactctcttcaaaacaactcacattctcaatgtgactctttccatcacctctaaaaaacatattaagtgctgctagagaccaaaccgtaggatttgtatcaaacccatacaaagactccctcactatttctgatggtattccaaatttttttgaggttttcatcatgcgatcaaatgatgcaaccaaaaatccaccagaaccacaagctatatcaataactttatccttcgctgtaacatcaattaactctgcacaatatttcgtgatatgacgtggcgtaaaaacaattcctaatgaattattatcatatccatatctaataaacgcttcatataataatcccagaaaatcagtgtctgtttgtaaaattgatttaatattaagttttttaagcaaaaatactattttacttatcttattagataatctattataatctccaactgtcaatttaagtgtttctattaattgttcttttttgttttcctcaaaatgatctgttgatttaattgctgctgataccaaatcattaatggactctaattcctttccgtcctctaagtcgatctcgccccaatacaacgccgtaattacagctcccaatacttttggacgcaatgacggctctatttttgcagatcttaatattgatgacaactctatcgcagtattaatataatcagatgtttgcggaatagaaacctcagtagtaccattattagtaactaaagcaccatccacctcataaacacttggaaaactagtcaattcatatcctttagctgttaatggtgtccattttttatcattccaaaaaaacgatttaaaaagatatccgtggtcctcttctcctgcaacacctactacaattctaattttatactttccctttttattaattgaattagcatattccattgcttctgatattgcaatatcaattttctttatatcatttttggcttcgaccacaactaacggaagtgatttcttgcacacaataaaatccggttttgttccatcaagtccacagtctggaaagaaatcttcaatctcttgctcctccaaaaaatctccgcctttttgaggatgtctaacatcccaacctttctgtccagcaatatctctcactaaatatctacatcgcgactctgctcttttgcttttagccataccagcacctccaaatattatcttgctcacatgtaattataactcatttcacgtaatcgaacaagcgttcgttttatcttttctgtctttttttattaccttatcagcctcttttagcgcaattcttctcacaaactcactataagaagaatatgattccaattttgctgcctgttttaatctatttaattcttcttcacttactctaatactcattgaatatgttttattcatacctatttcctcccataatattggaaattatatcattcgtgtggaacatttgcaatacaaagttccacttattcaactgtatttttaccagccatatcatccatatattcctcaaattttctcctaataatcatatatttattacttaccaacaattgtggcttttaccatctctatttcttaagcatccaaccttgctcccttagtagtaaaattggtattaaaattaaagaaggtaattatcatccatgaccaattccggaatttcagattctgcgcacaaatggccatcacaagttccatctaaccaatgcttacacgaatgtataccataataactatctgcacactgtatcgaatgaggatataagttatatttcgatttgtaccctataagctgacttacaaacgattgtatttcattttcaagaaaaatctcgttctgatttaacattttctgtgacatcggtttctccttcttctgctcaacctctgcctgtgcccttctgaactcttccattcgtttcaattcttcctctgcatcatcgaatccgatatgcgtgtacacattcattgtgaccgctatatccatctatggacttctccacttgttttttgagggatatattgtcagctagcactataagataataaataaaaatgaaattaaatatttagtgccttcttagctatattatcatattctttattgacaactgacttataatattttgattctggacaaatgatttctatcttgcacatcttatccacttcttcatgatcaatcatcctctcacacatatagcaaggtggatatttcacataaagttcatgtaaccgtccctgctccaaataattaacaaattttctctcacagcatgaaaacattcttttataggccttggtttttgcttttttactctcactggcggtcaaataaacgctgtctcgtagtcccttcaaacttattttataaccaccaggaagataataatcttccttatcgtcaacgtaaacatatgaagtaccaataagttttgacatcaaatagcttgtcgatgatggatcaatatcaactcctgaaatggatacatatttttttccggaatcgtcaattgccataattgcaaaacaactggttccgatgcgttttgatttactacagaatattgacatgtctgtatatttatctcttagaaatgtactccctcttagaacctttacaatttttctaacatagtttatattataaaatctcttagaaggaatctgattaatgctataaagacgaccataaatttagcccctgtctttttcatgcctcaaaagccttataaacactggatttaaccatatagaccaaaacgtatcattcgtctattttctttgttttttgcactttttgtatgttgtgtgcattttgtagccagtatttttatttattcatatctatacaaaacaagacagaatgtacttgcttttttactgtacattctgccttgaatcattcaaattcaaatatttaatttttccttttatactttagatatttttcttacccttgccaattcttctcgcaactctgcattttctttttccaatttttttatttttagtttcaattcctgtatagtcgtttttgcattaactaaagttctttccatagccatatcaataataatctgtttcggattatacgttacgctctgttgatgcatagcttcatttaccaccctgcgcatttcttcatttcgataaaaaatcctttagaaaagcctgttttttgaatcaatgcagcaaccgttattttttcttttgattccaacatttcttgaatttcccgttttgcggtttctaccttctgtttgctacgttccaaactacattcgaccattttatcgtatttcatagattatcgtcctctcaaaaaacttgtactacaccattctcacaatttttttagaacagaaatttctttcctactgacccgtttattcaatttctccagttcttgctgcaacagttcattttttcttttcaattcctgattttgttctgctaatttctcgttctctgctttggcttttaacaattcaattttcaactcaattactgaattttcaagttttctgtccattgcaaccggatgtctattcttaaaaattgcttcctgtctatgtattgcgtcatccatttctcttctgataagctcatttttataaaaaaatcctctagaaagcccagttctttttaccagctctgctacggtaattctttccatatttttaagcatatcagatattgtattttttgcaatattcatcttcctctgactctcagcctgcgtaatcgctaccatcttatcatatttcataatcatcccatccttctatgatatctaataggatcatgtccattttttctcttgcagctctcgtttcatctgccatcagtttattgccaatttttcgataatgatgtaccgaatatatggaggtatgccccagtagcttagctatcatccagtcatccacatgcatttctgtcaatttctttccataacaatgtcgaaaaatatgggttccaaacttcagaaactctccattatcatcccggatatcttcctggcggatcattgtcataatctgattttgaatcatgctatattgataaggcctagttggatcatctttttttgtaaaaatgtaagttgtttctccataccgttcctttgtataatcaattgctttcataatcagttgtgccacttcttcactgatggctttttcataggtgactgacttcacctgatcaatccttataaaatatcgattattccgcatgcttaggcagtctgtctttaaggtcagcgtatctgaaatcctcgttcccagtaattgatggataatcagtgccctacatatctgctcatccattttgaaaatgtgttcgtttaatcttttgatttccgcatctgagtaaaatttgaatacatgccttggtgtacttgggaaatcattactcagaaataattcgctcatgtactgtcgttcatataaattcccaacatcttctattacccttcgtagtgcatataggtcagatctataatttttccggtcatgtgcttccgtctgaagatatatcagatactcttctatatgcatccgttccagatcctgtagcgattgaatgtccaaatgttttcttttaagaaattttgagaaccgctttactgcagctatttcactatgaatcgttcctaaaggggaatattttaaatgcataaaaattactttttttacttcttcccgaatatctggctgtacaattttagtaaagttaatcgtttccgtattcttgattggatttccataaataggaaaatcgaagtttttaagagtccagatatctttttcctgctcatccctgtcatcctcttcttccagaaacttcaagatttttttcatatgccttacaatgccaggactttcaattcctattttgtcatatgcaggccgatattttttgcttgataaagcatatcctcgttccagcatccatccttttaacatacggatgattttttcttcttctctggcatcaaggctttgtattttccgatcaatcagaaattcccgaatattattataataggtcacttcacttgccatgctggacggtgcgagcatttttcctctttcccatataaattcttccaacttttcggcaagttcttctgatggcaatccttccagattaaaataccgttccgggctaatacgcattctctgaatctgctcttcggatgctaccttgtagcagtccagctcatatatgtaaattctttttttcattttctttcaccacgcttcttagctttaatggtagaagccaagtcattttccggtttcttaaagtaagtatcacttgctttttcaattctctttggcatgaagtctacatactgttttgtcatctcttcggaaaaatgtcctaaataatctcggattgtctgtatagaaacatcctcatcataaaattgggtagccagcgtatgcctatagtcatgggttttgaagatataactgccatctgcaattccattcttatcacagtattgctgaaactcttgtcggaatgttgttccccggtacgctccaccatccttccctttaaagatataatctttcggacgaatgtgttcacgctcaatatacttacgcatgattctatgtttccctgtctgtaacaccctttgcataggattcgtatgctgtccgaagctccagttccagtctccggtgtgtatcttctgccatagccagtctctgctttgccccacggatacgctcattatgttgctctctttccttttccataagaagcttcagctttgcaagtcctgatatctgcttggaaagctcaccttttatgataccatcaaggtctgttacaagtacccggtggacacagttattattcttcctgtagttcacttcacagttgaaaaatctcttgcccaggcggtccttatggtagatcatatttctgccgcaacagttgcagactaaccttccggtatagaccgatgcctttttccctaccggtgtaaaagcctccggcacagttcccttcatcgcttgtaccttctcatatacttcctttgaaactatagcttcgtgatggtttggtatccgcttccattcacttggcggaagcatcttcttacgtcgggaaccaatctctttcacacggcttttcccatacacaaaagtaccgatatacatctcgttattcaggatggaatttaccttataatctgtccacaggggcgaatcccctttggtgtacatatttgcgtatgtaccctttcttctgtggtacgccgcaggagtatcaattccttctccgtttaatgtccttacaataccggcaatactcgctccacctgcacgaagcgtaaaaatgctcttcacaacagcggctgcttcctcatccaccagaagctcacaggcattattcttggattttaaatatccaaagggagcacatatcccgataaacattcccttatccttccttgccattactgccgtagataccttctgcgaaagatccttactgtaaaaatcatacagcagagccttaaactgcacatctatctcaccgataccgcccacataatccttactgtcgtaattatcgttaatagctataaaacggattcccataaaaggaaatatctgttcaatatacttccctgtttccagatagtttcgtgcaaaacgggacatatcctttacaatgatacagtccaccctctgctcttttaccatagcaagaagctcctgcattcccggacggttcatgtttgtgccggaatatccgtcatcacacttttccgttacagtcatggaacgcaaatcttcatgtgagcttatataatcacggatgattctacgctgattggtaatactgttactctcatccgcattcacatcatcctccaaagataatcttaaatacataaccagattagacatctgtcctacctccttcattccacttggttcttctcggaaaacggaatgtatccgtataaccagtggacttatcactgttaaaacggtactgaatctccatatgccggtccgctgtcagggtaatccctgaaataagggtttccacaagctccggtgtcagaaccgacttatcctttacggatacaagggcatttacaaatttcttctgctcctttgtattacgaacaaaagctttgtaatccttctcagcttgtaacagctccttatcaagccttaccctttcctgctcctgccttctattggcatcttcaagctcatccctgctaatctcaccctttacatagctcccgtaaagttcacttccttcaaaggaaagacgctccgcacgcttcttcaaatccgctatccttgccttaagcgttgtttctgccggctggaagcctttttccaaagcattcagaagcttctttttatccggcacaagctcctttactgccttttgcaaagattcaaacaccagcaaatccagctgttcctcggatatctttattacagcttccttatccctttcctccacaggcagaggattgtgtctgcaacggtaataatacagtcgcacatccccttccccggaataaataatggaagattctctcgaaaaatcaccaccacacacgggacattttaagatgcccttatacctgtctgccgtcagcggtaaatcttctcttgccacaaaagatttcttttcctttttcttatccactacacttcggacttcataaaaaagttctttagaaacaatagcgtcatgggcatcctcatggataatccactcattctttgacaccttttgtctctccaagccctgatacagacacctttttgtctttccctgctgaagcgttcctatataggcttcattggaaagaatctgggaaatggtaccattcttccattcactaagaggctccccttccgtgatataggcaagttgcgtctgcctatattcttccggtattctgacccctgcctgtgtcagctcccttgcaatggcacggtggctcataccgctctttgccatctgaaatatctttctgacaatctcagccgcaggctcatctataacaagtctgtgtccatcatccgttttcacgctactgtagccataaggtgcatgaccaagcacactgcctctttccatacagctttgaaatgccgaagtaatacgctttgacacatcctttgcatacatatcatttacaaggttcataagagaaatcccaagccccttgtttccgttgtaatcctccacggtatcaaaatgatcgtttactgaaataaaccgcacacccagaaatggcagtatggtttcaatataattacctgtttccagataatcacgtccaaaacgggacaaatcctttacaataatgcagtctatctttcctgccctcacatcatccatcattcgcataaaatcaggtctggtaaaagtggttcccgacacacccctgtcaaaatacttctgataatgggttagttccggtcgctccttgataaagttttccataatcataaactgactttctatggaatcacttttcctgccatccttttctaccgacaatctggcatacagcgcaacatgatactgcttctctgttgtaacatatgttacagttttatccttatcagacgaaggaaccttatccgcaagtgcattaaatcttccttcttttcttgccatcctaggacacctccctcatggcttccgcttccagttcaccctttacaagctctaccgcctttgccatctcattacggtacttaaacactatctctaccgtcttgtcctcatagactaagatcttgtcaatcagagaaaccaaaagcatacggtccagcttttctatctccatattttcacgcaagtcatccagccactgtcctgctgcaattccgttttcgtatatggattttacagttgtctcctgcaccttaattgcagctgcaatctccgaaagcttgttgctgtaaatctccctgtagcggttaaactgttcctgtgtaataagcttctcctgtaaatccgtataaagggcagatttcatggcactgtattcctgctccttttcctttaacatcgcaatctccttatcacggtttagggcttcctcaaaacgaatctgctttgcatctaagatgcttaacaacttcttggtatccgtaagctgcttcacatactttctgacctcacccaaaacaatctcatttaatacatccaccttgatactgtgtctggtacattccttccccctgttatagccggagcagatatagtattcgttcaccgtatccttataaggaacattcctgctgaccagtccccttccacagtcaccgcagaaaagaagcccggcataaagctttggctctgtcattctttcctttgctcttgtatcacgcttcaaaagctcctgcaccgccttaaaatccgcttccgtaataatcggtgtgtgattgttctccacccgaatccactgggactttggcttttctatggtctttttcaccttatagcttaccttttctcgcttcccctgttccaaaacaccgatataaatctcgttagaaaggatgcgtaaaactgcctttggtgtccacttcgcctccggattcctttgaaagctggtcttaaacttttccccgtgagcctttttatactctgccggcgaaagagttcctctttcattcagctttgccgcaatggaattggcactaagccccatcagcttccatgcaaaaatatcctgcacaacccttgccgcttcctcgtcaggaacaatcttatttttgtccttctcatccttacggtacccgtagcagacaaaagaaccgatatactctccattcattctttttacctgctggttactgcgggactttatggaaatatccctgcaatagctctcattaacgaaattcttgacgggtacaaccatataccggtcactgctgttagcggtaagactgtcataattgtcattgatagcaataaacctaacattcttctgtggaaaatacttctggatataattgcctgcaccgatatactcacgtccaagtctggataaatccttgacgataatgcagtcaatctctcctttctccaccatggctatcatctccataaaagccggtctttcatagtccgttcccgaaaatccgtcgtcacagacctccttaaccagctctacatccggaaacccccgcacaaagctttctatcatcatacgctggcttttgatactgttactctcatccgtactgccacgcttatcatcatcttcccttgaaagacgaaggtaggcacaagcacggtatttcatctcactcataatgttctcctttcccggtggcagaatctgccaccgtctgtaaattctctagtatttcagtgaagcgactcgatcaatataggctgacaacaaatccgtgatactctccccggtatctgaaaatgtgctgattaccttgtattccccatactttgtggtatgaatatccccggcaagctcacaacctatagtttcctctatctcttcactgacagctttttgttctatcagttcgtccattctacttcctccagttttcacattagattcatggaaatgcacctcaattccgcttcgcttcatctcagtcgttgcatttcctcattgttagcacgcaaaaagaccgcctccatggcatcagagtctccctgcatacgcagtccaaacagatacatgttatctgcttcttttactctgtctgccatgaaaagcggtcacttaatctaatgtgcatctcaactggaattattgcactctctattgcttcttcattcaaacatattcagttaatacggttgcaagtacgacacttcgctggctgggctccctgtcggtaccggtaatccggtattatcagttacggtaatcttttttagtggaaaatataaccactgcaacctgtgagtcagagtatacatcaaaatctcccgactggcaagtgaacattaaataaaatttgctcgaacctgttccttccgtcagtttaggcgatagcgcaccttcccggtccgcctggctgtgccttgattctatgatgttaccttccttactgaatagtaactgtccaacgccaatccttaaaatactttgtattgcttggtcttaaacagttacaagtaaaagctttgattcctcatgttccgtaaggtaaaaggcaaagtttccctagggacttgttttgcatcttaccttacgaaacatttgtgaaaaaggaagtttgctgttctcaccttatgaagaatgttaccgtttcaggtaaccttgcagccactgtttcttttttatcatccacagcctgcatgggtctcttctgctcaagatcctctcccaccctttgcggaagtgtcattatatcttcgctcgtccgttaccggagtcatggcgtaagtctgttgttcttcataagcagctattcagttgtttaacgataatccctgcttcgattatctgttttcgttttttgattatagttgacattttctgcaaaatcaactattattcttataaatcgtattgataatcgctattttatgtttaacactttagcgattttcgctatagttacgatactatgtttaacaaagaaaggctgatattatgggcatttatgagaattttgaatccatcaaggatatgttaggatatagaaaatttactacggaagagattatagagaagggttatttgtcagaatccagcattgcacagatcgataaaaaaatggatgaagcacactctgtgctgtgccacttccctattggatatacctataatgaaaataaaacatccttctaccggattgctctgagcgagcagttccagatattaaaggaataccctgctggtacaagtattcttgattttattgcattggaaacagaggaaatcattgcttatatgaaaaatatgtccgaaaacattactaccatgattgaacaaaaggcttccgcaccggatgcagatggtattatccgctttaatttcacggatgttacacaaaccgctgtaaactccacactggcagcactccaaaaggacaacttctttctgttccttgttaactgctgttttctccagtatgtaacggaactgtttgtatataacttttatccgttcattgcactggagcattataaaaaaatcttagggaatgcttttaattatgatgaggataccgacattctgatgccggaagaagcagacggattatatgacattgcagaatttatcaactatggtatacgcatgaccgcagcatttttagattatcagaaggatttattaaccgcagattttgatatgcttcttatgaaggataagcttttctctgaatatgataccttacagtacctatatctcatggagtcaaaggacaatatgcgtgatacctataccagcacaagcttcaatacgcaccttatgcctatcggtgttcatgcttttaaccacttagacatagtaaataaaatcatcgatgaaaatatgcccgtccgtgaggtctatgatattaactccgtacaggactggttccgttatgaatttatgtatcttgccaaaggaaatgtattgtataagcaatgcaaaaactgtggcagattcttcatcccctccggcagattggacagcgaatattgtgaacgcattgatacagccagtggcaagacttgtaaagaagtaggtgccatcaacaccttcgtaaagaagcatgaaaatgatgaaatccatcaggcgtacacaaaagcataccgccggatggactccagaaaacgtactatgtatatttccaaaaaagaatttaccgaatggagcaaaactgcccgtgaaaagcgtaaactctgcgaagaaggacagattagccttgaggaatttcagtattggcttgataagagcaagtgtcgataaaacccttgttcctaatgcatatctcgcttttaaacgaaacctccctatgatttgagatgttgttttattataatcataactagctcaaaatgtatttttgaatatgacaatgcgcgcgtattttttaacttttattaatgtttctgagaaaaagaatcagttaacacagaaacgactggattgcaattgaaaattgtaattcttcaccccgtgcaaaagtaaaacatccttttttgattgtaaagaatcagttttgttataaaaaggttacataccactgaatcagtaacaacatgaatcgattccacatcctttttgctagcataaatctattcatgtacttccgtaccagaagaactaatgacttttgtatgtcataactgttcccttttatgatcgaagtgccctcaaattaacatttaaaaaacgaacacacaaaaggtgttattaattataatattccttttttaatccaacaattaaattagaaattattaaagccacaacaattgcaactaacgttacaatgccgctcttttcgaaatgatatacttccccactgattgctgtagccacatcaatattcacaatatttaatggattatattctttcattttgggaattaaattaatcaagaataaaactcctatacaacttactatcaataataagctaacataacctcctttacagactacatttgtgcatataattaaagcaattagaaatacgccaaatagccatgaacaaaatagcaatggcatcactccagtaaagttcacatccggaaaaaatactttcgtgtacaagctacatgaaaaaaagctaactacaagtgatacagtccaattaatgaccaatgcacaaaattttgcattaacaacttctcttattgctaatcctttagaaaacggaattatcaatgttccttttataagctcatttcctaaagtgttataaaatataattacaaaaacgacaaatcctaactgtgaaatatttttaaaatattgagcccaagcatctatatatgtcgggtctggcatttgtagattaattaaatcagttgataatgcaccaataacttcggttgtatactttgctccaattggacttattacgcctaacaaaaaaaacaaaagaacaactatcagcaccttaaatgttgcaacctgttcccacaattcttttttaagatacgcataaaaccctttcattgcacaacctccatataagtatcttccaaggttctttcaatcctctgaattccgttaatctgatattcttgttccccaatccatttaaataattcaggaactatttcctttgtctctaacctaatgaatacatcattattttcttcttgtaattctgcgaacttaataatctgtcgagcatcattaaccaaacgttttctttccgtttcatcctgacaactgactctgattttcacactttcatctgtcttggttaattcatcaatagttccatatcgcaataacttaccattctcaagaatacctacataatcacttatctcctcaacatctgataaaatatgagacgaaaagatgatactcgtctgttccttcgctttctttaataaatttaaaatttctcttctacctactggatctagtgccgacgttggttcatcacaaatcagtaaatgaggttcattcaacaacgcttgagctatgccaagtctctgcttcatccctcttgaaaatcctctaatttttctattcttatcattttcaagccccaccaacctaataagttcttctgccttttccttgcactcttttttacgcatcttactaatttcaccacaaaacatcaaatattgcatcggcgtataaaattcataaaattctggtacatccggaaggtaacctattttagtgtaacaaacacctttcccttttgtaatatcattacccaaaaatgtaattgtcccagaatcaggatacaaaaacttcataatcattttcatggttgtagtttttcctgctccgtttcgcccaacaaaacccatgattgtattttgtaacactgcaaacgaaagattcgaaataacttgctttttcttgaatgctttacttattccttttacttctaatacaatactcataattggtctccattaccctttccaaatacaaagtacaaaattggtccgattatttgaatcaaaagaactataacagtccaaacagtcttgttaccatttctgcaaccatacatcctatgaattccaagcaaagccaaaattgctaaaataacctccactactacaataggtatcacaattatcaataattcaccagtcatcattgtcatcttcccctttcctataaccccaattttttcatcgcaactttcttcgtaatattgtatacataaacttcaataagcattaaatacaaaacggtcatgaaatataacacttgattacttaataagtgcaaaaaaacacattccattggaatacacaacaaaacagatgcacataacatctgcaagggcattgtaatactttgtttaataactgttataggattttcccactcagtacttcccagcaagagatctaaaagaattcctacatttcccataacaattataaaagttattaggcacagaaatacacttatcatttttataatatctatttccttgccaattgcgtatacagaaccaatactatcaattattgcaaaaggtaaactacataccaaaaacacttttattttcgaatgcaatatttttttgaatctaatgggtttgctctttaatacatccaagcattttccttctatagatatgctacaataagtcgggttggcaaccccaaatacaaagcaaattaataaaggtaatactccgttaatttcattcatatagcctgtcttcgttaggtattcatgcattaattcttttggaatcacacaaaaaatcattaataatatcgaaaaaattattatcggagccaaagaattcattgcatatacttttgaactatagaatgcagctttttctttcctatacaatgcttttgaggaagttactccagtcaattttaaatttttgttccgatttgattctcttttccattccaaatttctcaatgtatcaccgtagttacaactaattttatatgctattatcagcaaaagagtcatttccacagcaatcatgattatcaaaaaaaagacatcacaaatattataaaatcccttttgagaactacaagcaatcccatatcctacaagaccagttattattacttccacaagaatcccgaatattccaaaccactttgacttttgaaacaaaaattctagcaaacttccaaacacagaaattaaaaatgaagcaaatatcaataacaataatcccaaaataatatacgttgcaggcaaatttctttgaaaaacataaacaatggtataagaaaaaccaacaacaatattccatctcagtgtcattactactgttgtcattaattttgccaaaacaatataaaatgtttttactggaagatatgaaattagtacatattgttcataatcatataaaactctttttatattaatcccgtaatcgtatattgccgcaacaagagaaagtccatatacataaaataaagaattctcgattatctgcgttttttttatttgggtcagtaatatgcccccatacagtaccataattccaaaaataaagaaccagagaaagagttctttcatcctcacatttttgctcggctttaataaatggatgttcgacatttccattttcagaatattattcagcactttcatttgactctcctactagcagtttttgcaaacagccggaatgatttacatttgcaatttcatcatctatcagaatattaccatttttgattactactactttatctgaaatccttgtcacaatatcaagcatgtgcgaagaaaacaaaatacctgcccctctctctcgttcagcattaatcactttaatcagctgttctactgtagacggatccaagcctgtaaaaggctcatccattacaatcaagttaggttcatgaataatagctgccataatcaataatttctgcttcatccctctcgaataagcagaaacaggtttatgtattacatcttccatctgtagcatatataccaaatttgcaattctttcctctttagctgcttttgaaatatcataaaaactactaatcaaatcaagatactgacgtcctgtcagatagtgatacacagcttgattatccggtatataacctaactctgccttacacaatacactctctttctttaatgatttgccattgataaatatttctcctgcatctgcttcctgtgctcctacaatacaccgaataatgctacttttccccgctccattattgccaactaacccacatatttcgccagcatccacttgaaagcttacttcttttagtgcattttcctttcccggatatgattttgatacttcatttacacttaacatattcgtattttccttcattatcaaagcttcctatcataaaaaatcttgtgtatagatttgttgcaattatatcacaaccagctattaaaaacaacattttgaaaaaagcacacaatacaccaaaaatgaaattttaaattccaccaccaccatttggtggtggaatttactcccgcacagtaaaggtttactctttcatataaaaatggtaaggttatctttctttctgacagcagtagaaagaaggatatccatgagtaaatatattccaggaaaccagaagcacctttcccttgaagaccgtatctatatcgaaaacgaactgaacaagggagaaacctttaagaacattgcccgctttctttgcaaggatccaacaaccatttccaaagaagtaagggctcaccgtctatccgactggtatcacaaaggtactttctataatgcccataacttttgtattcatcgcttccattgccggaaaaccaatgtctgcggaaaaatcattctctgcgatgtaaaatgcacttcctgccccacctgtaatcaaacttgcaaggattttgtgaaggaacagtgcaaaagactggataaggcgccctatgtctgtaatggctgcacaaaaaagataaatcattgcaccatcgcccagaaatacagatacgatgcacgttttgctgatagaaaataccgtgaaaagctttccggttccagagccggtataaacatgacaaaacatgaattacgcaaaaaggatggcattgtttctcctttaatcgagcagggacaatctccatatcaaatcattaccaatcatccagaactggatatgtcagtccgttccttgtacacctatctggatcaaggtctgtttacagccagaaacattgatttaaaacgtaagcccggcttcaagccacgaaagtgccataaaacacagattacaaacagaaccgtcttcgagaaaaggttattcagtgattttagtgagctgcagttatcctcttttgtagaaatggatacggtacactcatccagagaatccaacaagacgttactgacctttttcttcactaaggaaaagctgttccttgcctttctcctgaatcgttgtactaaaggcgctgtccggcttatttttgaccgtttagaaaaacgtatgggcacctatgagttcttatctgtctttgaatatatcttgacagacagaggttcagaattcggagatcctgtcgctcttgaaacaggactggatgaaattcagcgtaccagcatctactattgtgatcccatgcgtagcggacaaaaaggaggtcttgagcaggctcacaccatgcttcgcatggtgcttcccaaaggaactagttttgaatttttgacacaatgggatgtgaatctaatcgtgaatcacatcaactccactccaagggaaagtcttaatggaagcacgccttatgacgccgcattagagacactcggaaaagaaaccctaaacgcatttcagcttaagcgcattgaccctgatttggtcaatctaacgcctaagctgattcgcttcaaccattaacaaccacttagaaatctgctgtcggactggaaattaaactttcacattttcctcacatgaccggtggaatttagtctcgcacactaccttccagtggtccgtttgtcataccatcaaatcagttttttccaagaagttactcctattataacagaaataagcgttttgagcttataaaactcttagaaaatcaagaacttttaaatgagtgtggaatttacttctgcactggaatttactttttcaagttagcagcacacaatacatatctgtgagactaatgaggtttagtctctgactttaaacatatacttattttcaactttatcaattactgtaatatcaagccaaacacaatgagttccttctctttttcaatcgctgatattttcccctctatttcaaatccgttaataatcagacaggctactgttcttctgttactgttatacagagaaacttgacattttgcactattataattcttctgcaattcttccttcaatttttttattagattagttgctacagaatgtcgtctagatttttccagcacatgcaatgccacaatcgtccagatttggtcaacattaggactaatcgcagatatcacaccttgaacttcatgactctcatcatcaatagcaagaattgagatttccattttatgttcaatacgcataccaactgctgattcattcatatacatctgttcaatagcagatggtgtaatctcatccttgtgttcgaataaataccttattaacacttgaacatcttttttttcacaaatttgataaatcataatttcctccttctaacctttattccaccacaaaaaatacgcgttcatcaatcatatgctgaataaaagcatatatgtcatccaacaatgtacttcttgtaacgcccttatattcctccatcatctgattagcgatttctccaattgtatgcttaccatcgcactttatgaaaatatctgttgcaacaggattcaaaatatctaacattcctgttaccgggtgttgatatataatatagtcattattctctccatctaatctccatctaaaatttaacttaactggaattttattctcttgcaatgtattcatttatacctctcctatcattaatctttcttctaaagtgtctatcaatgtgccatttcctcgttcatccatcttcttagcaagttctaacatttcaggattatgccaccccatcttcatacgatcccaaatttcctttaaagactcttttttcaaatcaccaaaatatgcatcaatatacggtgatatacccaccaatccttctgaattaatacgtgcaacaattgcatatccatttttaacaccaaattgaacatgctctgcaggacttctaaactcaattggtatccctttaccacgctgattataaataaatgtctcaaatctcctaatctgcttctccgtagcatagatactttcctcatgcccttttacacgaccagatatggaaagtttctgggttcgaaaagagctaactcctaatgactcacataatttatatgtattctctaaatcatcaatattgtatttcgttgtagcaaaagaaacttttacttgctttccttttgctacaaaggccttaattgtagttactgcctcatcaaaagatccttcacgtccacgtaccctgtcatgaatctcacttgtagagccatctaagctaacttgaatcatacttacatattcacaaatttgattaatcttagccggcgtcatgcatccaccactaaaaatacttccaacaagtacaccattagtcctaaaataacgcaacaagtccaaatactcaggacatgccaaaggctcccctcctgttaaacaaacttgaaaaattccagcttcaatcaactgattggcaatttccattttctttttcgaagataattcctgagttcttcggttgtgagaatcattatagcaataaatacacttgttagggcacccgctcgtcaattcccacattacatataaaggtgctgaaaatccccctttaggcaccagattcgcattggcaaattgaatgaaattatccccttctgtaactgtacttatatccgcgttagtatttccaaatacatttataaacttactcatatctttttttcacaaatcctttctctttaaataatttttgcaaatcaattatgttctttacattttgaagtgtttcatctttctgaattatttcccaaccttttgcaaatcccttttgccatgcgtcttgaaaatcagcatattcaaatagatttccatagatatacggaatatatccattcaacattaaatcaccttccggcgaaataattccaccccaattgattttatccttcattccctttattaccgctttagattgatcaacaaatctcacgcataacataccctcttttgcattatttatagcatatttttttgtcactctttcaatttctttttgaatttcatcaatatcttcaaaatttaatgccaaacctttatcgtaggtcatataattcatagctacaaccggttgtatacgaatttcgttcacattatgatttatcatttcttggaccaaaggctcaatctctttcttatttttcttagtaataaccatttcaacactggtaaatattttccccaagccgtatttatctatataggaaatcaacctctttgctgaatcacatgccccttcgcgccctctctgataatcattaatctttgaatttaccgaatccaacgaaatattaaaagccactaacgaatttctacataatctttctatttgcatctcgtcaattaacaatccgggcgaacaaatcattgtagatatacctgcatcagtaaatttttctaccaatctttctaaatcattgcacagtaagggatctccccctgataaagaaatcataaaaattttcatagctattaattcatcagccaacttcatgcgttgctcactagtcatatcattagtctttttaggaaacccaccagagcaatagatacaattagacatacactttcctgtaagttcccaaaccaacgaaatcggtgcctgaaaagaattaagtgtttcaaattcttttggtacaattatttctccaccaatccattgttccaaattttcactcgttacaatcgtcttcaatgcattacctgtttaaaggaacaaataaattcctcttttctttcctttctcgccaaaggacaactgaattcacatcgttcaccacacctttgacattttataaactctgcgcctctaatccaattcaacacagatgaatccttccatatctgcttcatgtctttttctaataaattattcttttcttcctttaacacatgctcgtcagaggggcaaagttttacatctccatatggatcgacagtacaatgtattttcccagcaccgcatgctggcattatcccactggaatcaaatacctttgcatatctgccttcatcaccaatatttaacatattaggagtacataacaccatgtcagtctctccatatttttcgtcaaaccactgtactacatccttataaaatgcacgcaattcctccacatcatcttcttgaaaggccaactgtgtattaaccttagctcttccaccactttcaagaggaactacacacacctctcttaccccaatctcataagccttatcaacaatctttttcaaaccaaaaatattcatttttgtttccattacattgcatctcactggaattccattttcaatgcatgctttaattcctcgaattgttgcatcaaaagaacccgctactcctctaaagcaatcatatgttttcgcatcataaccatccatattgctctctactttttcacatcctgttgattttaacccttttgctaatttatcatcaatcaatgtagcattcgacaaaagacaatagctagctcccttgctctgaatatactttgctatatccaataaatctttccgcatagtagcctcgccacccgaaagcagaatttcaaaaacaccagcctctaaaatattatctattaccttataccactgctgtgttgttaactctccttcaatatatcccttttcgttatatttacagaaatccgcatctgcaaaacaatgaacacatttcaaattacaaatgtgtgttaattcaatcaatacctttaatggcgccgaaagaacatatggtggtaatcccaatgtataatttctatcatacatatcttgcgtaggaatctttttcatatttatacaatcttttttaacatctttaccattttgaataaatttacttgctgttaaatatgataaatactcctgcaaatcatctttaatcaagtgtggatctgcttcatactcgcttaacagatactgttcaatttcttcttgagtctttccttgctgacatagtgataatatttcatatgcagagtcatttaacagttcaattaccaatctatctctttcataatatattccgccgaacgcttcttttcttattcgtcctactatagttggttttacattcttcatcacatcttccattttatactcctcttattccgaaagcctttgataattttaatttagagtcatatcttaaatatttgaattatattagcacatcaataaaaccatattaaccttaaaaaatgtcacactttagccctatcttaaagcaatacatttttcaagatagataacataactaacacaagaatctataccaaaagaatctgtgacatgtaaaaacatgtcacagattagaaaatataataaatgtattttctattactaaattatgtagcgggccatacccatccaaatacaattccaattgcccacagtacaactgcgccaattgccagaccatactcgttatcaacacttgataatcttaatgtggctggagaatgatattctttcatgtcttttcctcccttcaaaatttatataaatcgcaaactgttaagttttcgattcataccttagttgtttatttgctctatataaaattcaaatcttgattttaaataatatttcgaataatcttcccttgctatacactaaatacacattttcactgtcagaataacccgtttcttttcttataacacacttattcttctactaacactaaattaaaacatagcactttttcattgcaacccaactatcataaccaaactgtcttaatcatctactttgtacctgtatatttctatatgtttgccagcataaatataatacgacattatatcaactcattattggtatttgcattcgcaagacaggtacataacagatacattgcacaaaaatcaatcttccgtgctttgattttcttgtattatttactaatttttctgttgacatatttgatataatgtcgtattatatcaacttacaaatcaagtaattccaatcgttttcttttttccgaagatgatgtttttgtataaatccaagtagtttccaatcgactatgccccaaaatatcggcaagctctgttatatcccctaccttttccatgtaattctttgcaaataaatgtctaaaagaatgtggaaacaccgtttcctctggtattcctattcctttggcaatgttttttaaacccttccacaccgcagccgaagttataactttcccctctttcctgccggtaaaaactattccttcccttatgccaacatcattacaatattgcaataattcaatacacaagcgttctgaaaagtatatatacctatattttcccttgttccagatttgggtatacccatctgtgatagcaccgaccgtcacatactttaattctccaactcgtaatcccgttccagctatcgttctcataatatgatacagctttattcttccggtatcctttgcatattttaacattgcaaaataattttccttacttatcattttgtctaaaatatttggtgcctgtatacgctctgtacgcactaccacatctgagaacccaagccatctaagataacgattaattgaaataatttttgaatttacacttgccgccttatatttcttttttaattcttttttatacgaaactatcatttctttcgtaataactgtttcctctactttttctaaccattgcctgatatctgtaagatatttgtgaattgttcttacagataattcctgcaattccatctctttttcatactcccttagcctttcttccgcttgtaccttttctaaatacatcaacttttcctccttgtaaacactacatttctataggtaatattgcttttcgcccctattacacaaccatccgcccctaacaaaacaacaaaaggaggtttactccacacttgtgtaaaaacctcctctaccattacctactttttcctttattctcataatctctttgcaatataatatccgcttcctctcgttgttctgacttcttatccttcgatacagcctctaaacgaataaattcatccagcatatcagcactatacttgtatacaatacctatcgaattcatcttgctaacaaatctgtgaattctctcttgcacatcacaatcttccagaccaatccattcaaccttttccttatccgtcagagtttcgtatcgttcctttgtcatctccggctcatttaccggatgataagtttcttccactacttcctcagcaacccgctctgcaaatccctctgtatcctctgaaaaagcttcggataacggaaccgtttctgataccggctccgttatcgtttccgatactaaggaaactgttggttccacaaatggctccgttctctccgccggcccataaacggtgctttccgtttcaaccgttttctcctcataggcttcatattcaggataagaaatcgtttcactctcaaactccggcacatccaccacataaagattctctatatccacatcatctggtatctccaaatgtgcgtaggtactttcgcttagacaacggttaatggttccaagctcacttttagcttccttacgcttctccttaagttctgccagctgttccctgtagtgtgcttcgtgatacagataaacagtaacatccccacccttttcatactggtacttttgacgggcatgttcgttataaagctccttcttttttgcatcaatatcagctatctttctctctgccacacgctttacatcaaacacatcattccacccgtttataccggtacggttgagaaaaagatactcctcctgcaactccttcatacggataaggtcctgctgataccttgtgtacttatactgaaaacgatacttctgcaccacacacatccggtacagtttcccataatatctctgctgaaatgcattctttggtttctttataagagcatatcccggctgatatactggtagtgccacatacttgtaagggtgcggctgttcgtagtattcctgcaaattctgtagcgaaaactcttcatcaagcgtatccaaccttctgcttcgcctcatgccatctgcttttacggaaatatgggcacctacctttacctcatagccaagcttttccataaggaaaacaaattcttcaaagctttctgccttattcctgcaatacagcatatctcccgttatgaaatctttccagctctgctccttctcccactgcttacgattcatattcacagggtccttactgtactccgcagccactatggacaagccgtattcctcacacagcctgttggtaatgggctgtatgatatctttccagtccccttttctatagtcgtacttcctgccgttaatcatattcacactgttaaacacaagatgtgaatgaagatgatccttatacgtatgaacagcaaataccgcttcatactcaccacctaaaaattcctcggcaaacctttgcacaatgtcatacatctgctctgtggttccttctcccggctttaaggatatgataaagtgatatccctgcctgccaccgacctgtccaaacatctccttcgtgcctatcatctgctcgtaggcataatccggcaggcagtttataccgcccaccagacttctgttctccgtcttcgcctcattgcagatatattcaagagaatgctttaagtgtgccgccacattccccgcctttcctgccttcatatacataatctttgtaattgccaaacctatctccacctttctatcagttccttaagaagctccaaaactgcatccaaagcctctttcatcctgcgtgcatccgtactcccaaaccatccggtttcattacagtgctttgccatctgattgatattggtggcaatgccactaacctgcctgataaggttccttctgtcctctgcgtgcgttgcatccacaccgccatgaatgataagctcgcgcacatacttactttcattcatcctggcagcctttgcaccctcggacatcttccttgattcataatccgacagacggaaggttcggttctgccttgccgtccgactctttgttgttatctgtttctccttcatcgtaaattcctccaatcattaaaatctgttgcttatctgttttctgttccgctcaatgctcccatgcatttctacaggaaccgcttctgaaatctctccctaacgaaatggacagaatttctttcagataaaaactgcaagatacggaaatcgcaatgcgtttccaatcttgttaggggctgttgcccctaaaaccccgatataaatacctatatttcacgagaaaatatccttttctgcatatttcctgtaaaacaaaaagcaggcatatcggcaaaagcgttaaacactttttgccaaaatcctgctcttgttatacagaccgttatacagataaaaagggcaataaaaaaactgttaaacacatttgtcgtttttcttcctaaatgtttaacagtttctatcacttttcctattctgttttacggtttgtttgacagttttcagcctaatcctcgtcatcatcatcgccgaacatggcagccagagaggcggcagtaccaccatccatcggttcatctgaataccccagcagattttcaggcaattcatactcctcttctgcggtttcagtctttgcggattcggttgccatctctgttggtgtagtctgctgtaccacattcacaggcatagcctgcatcggagcgtagggcattggcacctgcatctgcggataacaaaacccctgatgccccatagctcctacaactgttgcaagggtctgagtgattgcattctgcacaatcttctcgatttcaaccctgctctgctcggcatagtctttcacaaacctctgcacggtttccaacatatcaagctgctccctgcttttcgcctctccccgaaggaaagacagcactgcccactttaatgcttccgtataagattcataaatctgctgttgaattaccacctcgtccaaccagtccataatctcctgatcctcacggtttttcgggttgatacgaaacgctactgtttttgcagccatagctccaccccctttacaccagattctgtgcaaggtactgataaccaagagcatttgcacggacatccgttacatatctcacattgtcaccggtacagcttccaaaacgcctcataacacctgcaccgcctccgacatacaccacattggtaaagtcaaagtcgattttcagttcacgaagttttgcttccacctcaagagcgtaacgcttaagacccgcattaatggtatccataatggcagccttattgtttgcaatggcatcggtatctcccttttcaatcacctcattgatgatatactccggaatctcctttccatggactgcatagcattccttctgaatacggtcaatggctgtaatcagtcccagctgataggtgtggcagtcatcaagcacaggaaccttatttactaccgacataatatccaacgtccaggaaccacagtcaaccgctgtcagtctgtccatgccatccattcggtttgcaatggctgcgtgacactgagcaaataccctgacctttccaaagtgaatgacatatctgacgccctcataatgaaaccctaccttatcgttagctctcagatagttcttaaatgccttcttctcttttccgtacagggtaagcggaactccaacagccaaatccaccttttgcacggttgaatagccaaccctttttatctccctggcaatcgcaaccagcgtcagcagataatagttgtcattctccgtcttagtttcctgctttcccattcttccctgaccaacaacataaatctttcccctgtattccagtacattctccttcgttgccggcatggtcttaagttccttaattccattctcaaaaatgaagtttggtgtctttatggaactccagccgtggtcaatggcaatcagtcttggcataagtccgtctacaagcttaatgccatttgcttcgtttgtgttcatgttacttctttctcttatagattctctcatataaacctctttctccggcaattcgggtgccggtcccaaaataatcttctaccgataaaaggtggcagctaagccaccaccttcctcttaaactaaacttcctaatgatactgataaacaatatctgaaagcactacttcttctgcaatgctttttgcctgttccctgagcttccacatttccattgtggagccgggatgttcaggcggatgctttttcaaatgctgactggtaatggtatcaagcattttgtaagcctcttcatttacctcatgtgcctgactgttaatacatccaagccttgcaagggttctgtacctctgcttatgattttccttcatataggacaaccacagcaatccgtacttccctactgccgacagctccatatccttcggaattgtcagcaccggatataatattccgtccctttccacataaggaatcttaatccttcccatggcatatcgccccctttcctaaaatctgccttaacgatagcaccgaaactcatagaaatccgtatgcgtaccctgatacactcctgcacattcaatgtaaaaatacgggtctacttccagtaccatcattccggctatgtaatccgctatctcttcttcactgtaaagccttcttctactaatggtggaagcaaggttcagattagtttccacaaatacggaataataaccgcaaccatcataagggtaatactcgttgtattctacctgtgtaatcttcccctctgccaacagattgtccagattttcaggaagagaaatcatccctgccgccttacacttatcaatggcaagtctcgccacacggtcagcatcataccctacatactctgcctgcggtatctcaaaggtaatctcaaataccggactcccgtcagcaggattgccacggtcatctgtctcagcttcatctgtggttggtgtctgcgtagtcggctcctgcgttgttggttcctgtgttgttgcttcctgcgtttgcgattcttcacttacagatggtgtcggagtagattgctccgttgaactctcctgctgttcagttccctgtggattaacaggcatatcttcctcggaagatgtctgcgatgtcgcttcttccttttctgtttcaacaacctgctcctgctcagtcaaatccgtgttttcttcggtagtggctatagcatcttctataatagcaaccgcttctgataatatatccgtctctgaatctgatacatcctcagtcacatccacacactctgtcatatccacagtaccgcctgcatatcttcccttacagccctattagaacaccctacagccaccataagactacacaacaccaacattaaccatacctttttcatcatacaaatcgctcccttctactgtggtactgctgcttttgcaaaaatcagaaagactcttgcaaccagtacgaataacaacaaaaacaactttcctccataaagaactgccttcaatacaaaaagtacactcttcaaaaggaacttcactactgcaatcaaaatgcttcctaatcccatacaggacctcctctctaagcatttcccctacaagtgaccaaacttaaggaaatgctgtcactacttgttccaatgcagccacgcatcggaagggtaaaaaaatacaccatcccaaactaacttcttatcgaagtctaagcttaagatggtgtagtccatacccactcttggtttcatattcagtttttacaggtgcctttctccaccttttttaccgtaactgattaaaattgatacaatggactaacctctgaaacgccctatttataaggctttcttaagcttgtcactattatatctcaatccccatccaaccatcgataaacactctgcacacatccaaaccctaaatattcttgaatatcttttggttttactcctctcatatccataattcttcgaagattaacacctgtttcttttttattaattgttggaaacatactatcgcatcctttgcactaaattcttgttctactcagttcttacacatactttcttccccgaaaaagcaattccaaacttcaagatttccgtaattccatcctctttcatttcagaatcgtatcgcaactcaccaatttgctttaatgcttcattagaccatttttcaagctcaacatcgcttaatttttctttccactttaattccaaaataataccaggataccttttttctcttggaattaaagaaacatcaaatctgccatctccagattctcggttcgatttaatcttatactgattatccattaatgctattaatcctagcatcaaaccatgataaaatccttcagctccaccatcgaagaagctaattgatttatccatatattccccaatagcgctctgcaacttcttgtaatcattggcataaagactttctgcaatcttatttgctgtagtccttgtaattgctccagtttgcaagaaatgtgacaagatttcactcttatatacagctgcaatctctctatttggaattgatacttcacataaatatgaaccatctgcttgcagttcctttttaggagttttcaaatagccagcaaccaacaataagctataaatatttgctggatcctccgcaagcgatctatacaccacattttgatcaattcttgcaactactctttctccttgcaaaaggtcatataatctttctgtaatatcatctgtagccactcttagtacatcatcaaggatttcattttttcctgtatttacccaatatacttgaggaaggcatcccttggaaatatagttgattacagaccatggattatatatttcttcgctaccaaacaaatatccatcgtaccagtctttaagttcctcctctttatctgatactccatagtaactgagcattgctttcacttcagattctgtaaatccaaaaaagctatcgtattcttcatccattacggagttcactgttaaattatttagaccactaaagatactttcctgagcaatacgcaaaattcctgttaggaaaccataggataaattcttattatccttaaatgctcctgaaaagaaatttctcatgaatccaataatttcatcgtagaaatccttagagtatccctcttgaatcggagtatcatattcatcaataatgattactggagccttatcataatgtgaagcaagcattttagatagtctttctagcgaagaagtaagctccacttcattagctgtagcgctaataatctttgtaaaatactccttctcatattgtgagagcttatcactatttagtagctcttgatgtcttccatactcttcttgaagtattccccttattttatctattgttgcgtcccaagtatcaaatttaacatccttaaaagttaagaatatgactggatattttccttgatgtgaacgatactcttctccacattgccaaatatttttatctgcaaaatacttactagtattcttatctgatatttcaaagaacactctgagcatatccatattcaaggtctttccgaatctccttggtctcgtaaacaaagataccaatggcttttgatccaagaattctttgattaataacgtcttgtcgacatagtaatattcttcttgcgcacgaacatagtcagagatgccgattggtaatgatttaacttctgctttcgcaaccatatttttcttgatgtattttccattagacactcttccatccattggctttggagagtcgtctggaattaaccaagatcctttttcttttattgcaccctgtattcttccttttttgcacatatcatttacggaacgtggagaaacattccactctaaagccttttctttacaagttttcatatatatatcagctcctgtcattcgcaatattattcctcatcttacgcaaattatacctcagcgaaacgcaaaaagtcaaatcaattcgatattttgcgtttaattattgcgtttgcataatgttttgcgtcttgtatttttcggcactattattttggttttttcaatccacaaacttgtttgtagcatattactcagacaagtttaactccactgaaaaaggaccagcccagctgatcctctccctctatcacatccccattgtaatttattcttatattctgctatttttactttgcagccaaaagtacggtttctaggcaaattatagcatattgttgcaagtctattcttacaattccatcagaaaatgttcatgcagcgcacgtttcacctgatcgaaattacctcgctccggacattggatggaaacaaccaatcccttctctgggagaatcgttgtaatctgtccgaatgcgccatcagcacgataggatcctggatatggactgatccagaactgatagccatatcctacatgccagagatctgcagatggctcgaaggtaaatttcggggtggacacctcctgcacccagtccctgctgacaatctgctcgcccttccagttaccctcagccagatagagctgtcccagtttcatcatctcggtacaagtcagatacatacctccgccgccattcggatgtccctgtggatcatgctcccagagcggccatcccatatcaaggggctggaataccttctcatacagatactctcccatccgcttgccaacggcccgttctaccatatgagcagccagaatactgtcggcagaggaatagcagaatgcactgcctggctccacaggaaccggctgtgccatcatatatttctcataatccggtgcgccgatgcccggacgtctgtccgcattcatcagaagtgccttaccaaagccactggacatgcagagcagatgtttcaactgaatcttctccagatttggatccggatttgaaggaagtttatctttaaacacttctgccacatgatcttccaggcttagttttccctcttccattgcgagtccaactgctgttaccgtaaaactcttggtatgtgaataaatatttctcggtgcatttgctgcgtagtgcatctcacagagtaccttgttctcatctccgacactgatagcttccagcggcagattgtggctgctggcataacgatgaaattccaaaaacttcttttccagtaacataatacctctatcctttccggcaaatctctgatctggttctattatctcatacacatctctgcatctgtcggcagtggcatcagcggtgcggacggcagggtctgataccaataagcaacactggtgtaatcatcgtaacgcggtccggtccagcccatgttgtcgagtgtcatacgaaacttattctcaaaacggattgggtctgcaatatggaaatgatacagcaggaatctctgctgtccgttatagaattcccggttgtctccatagattgcatacatgccggtatataagccgctgaaggtctgatagctcttgatgatgatgtcatttccaaatccataggaaccgccgaagtagtcttcagttccggtatagtggatagacggatacggatcatcgtccagatacatgcgggcttcgccttctacccaacatgtattgttgccattcataccagttgccagagtcacaccaacaaattgtcccctgccttcgattccgtcaacgattgtgtaggtacgacccttctgaaccgggtgctcttggcgataggtggcatggaaataaccagcttccgccggaatctcctgataagctccggtgataatataatagagattttcatccttgtcaccacggttttccatcgtgatccgagctctcttatggaacggcatctcaaaatagctgttatagccgcgaccaggagctaccagcatcatggcagaattcaacaccggatatttgccatcccggtccacgaaattttcatcataggcacatccgaagaatgcagagagcggagcttccacagacggatattcctgatcatcccaatacatacggatgataaaatggtgccctacatatccggtaaaccacatatgctggatcacacccggtcctgcagcatctaccagagttacggtttcccctgcaggaatcgtcacggtcggacgaagcttggtgcagtcaccgccctgggaaccacctgcgcgtacaccggttggattctctgcggaaaatgcaaacgttttggagttctggatcatacaatagttgttcatattcttctcctctctgatcaaacctggatcatctgaaattattgcttactacgctatcgcgtttctctattcactataaattcactataacatttatctcccatgaagtgacggaattacagaatcattccgtctgcgccttctcattttcttcccggataatctcctttattcaagcgcttaaactgattataccataaatctatgaacaaagtttatctgtaaagaaaattgatacagagtttttcaaaatcggtccatctgctccccgcaggaacttctttcaccacaaatcatattcatttttatcgaggacagtccggttaacaaattccaacccgaaagctttgattttaggttgtcgcggtacactcgcgcaaaataagggggggtacaattgggggacaaataccattctcattccccaaaagccttgattttaagccacttcagacaaaagtacagattctgccgtggcatacaaatagtacttttatcattgttttgtttctccttgttttgccctggaatgccctgttttgcaaggggttctggggttatggtaaaatgctctgaaattacagattgtggcaaatcagagcagaattgagcacgttgttactacctgttagtagtaaaattagtagtaaaagagactttcttactactaaggatttttatcatcaatgtattactttaagtgcatcctttcttggcatctcaaaatgtttcagtttttcactattctttaatatctgatagcatgaagcagatgtaagcgaaagtaattttataaccgccactccaaaatataagcaaacacctgtagagcaagcatattcacttatgataccatgtgcaatctcatttcttatatttgcacccgcttgttcatttaacagtcctctaaatgtaaataaaatatcattatcataacaatcaaccaattctggcaacgacagaatagaactcagcactttttccattgacgagccatctttttctaaagttactgttaatccacctacctctcgtgcaatatttctaaaaagattttctacctgtggtgcaagaatatgtaacgcttcataatagtctccgttcaagaacatatataatccgctttggaaaattcgttctcttccatcaggaataattggattatctttaactaaaaactccaccatagacttatcaataacaaatttatctcttattataattaaagcattcttcacccaaatatcaccagcaactttttgtttttccaatgcattttgatacatatgtagctccataagtttcggatctttttctgggtcatgaatatctagcggatgtaacgccaataccgtttgtccttgagcatttattaaactcttcccaaataaatgtgaaataggattatctttaaattcttctattacacgtttttttatatcttcctgtttctcaaacacaaacatctgtgtcaaccgaattacacattcttcaaatgataatccttccatatttgcttttaaattatcgataacaccttttatatctaattcaacagaaaatggtaccattattttaggtatttctttttgtatttcaacgagtcttttatgagcggcatctgctttgtctgattctccattattgcgatatagcattattcctttttgataaaaattgacagcccttaatgccccttgtatatccttcttgaatattttctctgcaaactccagataataatctgccaataaattgttattttttattgcatcttcctttcttttcaatttaaacaaacattccgtttttaatttatatgcttgttctacctttgcaatattatcactgttgccatcaatcaaatcatctaatactggtaaaaatatagaaacatcaaaattcttctgtccaaaaaataactccatcactctaagtgcaaaaaagccatcattgtttgcagctttcttctccaaaaaatcaacaaaccatccttgtattttttcaaataataaagtttgctttgtttgtgctgaaatacatactgctcgtcgaattatgtcaattgtcccaacattgtcatcatccctataccaaaaagtaaataattcccaatatgcatttgctgcaattttagcagcattaaattcttttttattagtccacaatatatccgcaatcagtgcacgtaaaatcaatggcattttttctaatttcaaactatgcaatatcaaataatcatcttctgatatatcttctattgaaaaagttcggctaccatctgccattacgaacataggatgaaattctattccatcattatgaatttttgttcccaacgaaactatgtttttcaataaatcaaaaatacttctttcttcttcacttaattcagtcctatcagcttcaataaacaaattaggcgacaacgaatatcttttattcacaataatccgattcaataactcatatatgttcaccatatcatctcctaaatgctaaatctctctgaattatattatatcgccatttgtatttcttttccacaaaaaatcgccccagccaagtcagagcatcatcccttttccatattaaactaccttaaacattttctgtgacatcggtttctccttcttctgctcaaccccagcctgttcttttctaaactcttccatccgcttcaattcttcctcagcatcatcgaatccgatatgcgtgtacacattcaccgagataacataagctgtgcaaatggatctgaaatatccttatggtctatatctaataagaagaaacctttcgtaatcttcaagccaagccccgatgcctgaaactgatttctggctgattctgcatcatcaaaagatacccatgtacccttatgtgcatcatctgttcctgtagctcctccttttctccaattctgtttaatggttaatagatgttcttacaagccattctttataggcttcaatcggaatcagaattcttgctccgattcgtattgtcggaaatcccggtgtctttaccagttcatatgcctttggcaggctgattcccatctgtgcagataattcctgcacactcatagttgttttctccataagatgttgctccttccgtagagttggttatgtccgtctcttcaataattgtttctctgctaccgctcatggcggctaccagtccccgcagtaacaaaggcatgttcattgagaatgggatgaaattgtcaaggtacaaatccgttacagcattttgtgtaactttttattgttttcatgaatattttaagctataatgtaaccgaagtccaaaaactgacggtaacgctaacggttacgaattaacgattggaatgaggtatgatatgccattaaactggaatgatgaaacgattccatcagaagcagataaaacaacagatatattaggatttaaagaaatcggtggtatcgggcaactgatttaccaccctttccgattcaagaaatatgaacttgatattgataaaagcgatgattattgtgcaacaccattttgccgccccggatatgaacccatctttcctaaagaagattttctttccggacagggactgcttaccagcctttgcaatctggcaatgcagataaacagctttgataataaaattccatatacacagcttatcatggaatggtgtacaaataatatgcatccatataatattgatttcatttattctgaattgaatgaatcgtttgatataaatagcttcgatgcagaaatggtagaaaaagacggaacattcgagattaacaacttcttagatgacctcgggaaattatataatgcagtcatgttttatgttgctctcgaaggtgtctgtattgccgatgacgaagctgcatatgatttatccaaagaaggaaaatactttgagggctactctttctttgataaatataagcatcctatcgttgcaataccggatgacttagattatggggaggcaaaaggaaatctcatagaagaaatgcgaattgataatgagtacattaaaaatcatccggcagaaaaacctccaaccggagaatttgctactacaccatatgacgattacgatgaattgcgaaatgcgcttattgacatcattccggaatttaccatgaaattaaaggtagatccccgtactaaccgattagaattttctaccgatattaattccgtgtttgatattgcatggctgacacttgcaagaatgctttccgaagaccctgcgccagaagataaagggaaatcagataatcgtccagaaggcattatgattcgttgtcggaactgtggtaaattcataatccgaaagagcaaccgacaggaattttgtgatgccgaagaatgccagaaggttcgaaatgcccgaaagcaaaaagcctatcgtgagcgaaaatccattgaaaaggctcaaaaaagcaagaaaaaagcacattaatttatatgatatggcggaaaggcaaatagattattgtatctaatgtcagccagctacatgcaattatgtgctatgatattatataaaatatgttaaaagacaccggaatccccctatgcaatttcgcgaaaaaacgtgtgtgagggggcatcggtctttaggatgaatagttacagagataatactccccatggggttaacggaggacatacataatggcagatttagaagtacaagaaaaagatgggaaaatatattgtcccttaaagaaagcatggcacatatcaacaccagaagaaagagttcgtcaatattacatcgctattcttgctaacaaatatggatactctcttaaacaaatggagcaagaacttaaagtaaataactccaaacgtggtcaaggtaaagctcgcgcagatattgtaatttggaaaaatgagcaggacaaaaaagacaaaaaggctgcttttattgtagtagagtgcaaagctgaaaatgttaaggttcgagttgaagattattaccaaggatttaattatgcttcttgggcacatgcagatttctttgtaacaacaaacgaaaaagaaacaaaatattttaatgtagaccctgcatatttacctcaaaaattagatgaagttgtagctattcctactgctaaagatgtagatgatgctgcaagaattgaacaaatcaaaaatcaaaccaagctttttacacgtgatgaattcacaaagacgttacgcgcttgtcataacataattaggaataatgataagttatctccagaggctgcattcgacgaaatcagcaaactacttttcatgaaaattagattcgagcgtgacaataagggtatgaaagtattcacaaaacaggaataccttgatgctgcccaaaatcacgaaaaaaatgttagaccgggtctaaagggcactgacttatacgcactctcttacatgcagtttttatttagaactactaaagagttctttaaagatgacagattatttgatgataaagacgaaataaatatcagagaaaatagtttcattcaaatcttggagaaacttgaaacatttaatctatccgatacgcaagatgacgtcaaaggaatagcattcgaagaattcctcggaacaacattcagaggcgaattaggacagttcttcacccctagaactatcgttgattttatgacagaaattcttgatcctcaagagggtgaggtaatctgtgaccctacctgtggctctggtggattcttaattaaggcttttgaatatgtaagagaaaaaatagaggcagatatccgttcaaaaaaggattctttaagactttccattgaggggaatgactacgatgctcttccagaagataaacaagtaaagataagtcattccatagataaaatgcaagcagcactaaatactgaattagatactggcattgagggtagtcgaatgtatcagctttctaggaattgcatttatggtacagatgctaatccacgtatggctcgtacatctaaaatgaacatgattatgcatggcgatggtcatggtggtgtgcatcatcatgacgggttgcttaatgttaatggtatttttgaagagagatttgacgttatcttaacaaatccaccttttggtcagaatgtggatagaggtcagctcatttcagaagcagataaattcactgacgaagaaatgaagaaaaaatataagaaaaaatatggtgcagcttacgatgaagccctaaagcaggttgatgaccatatcggcgagtcattactatctctttacgatttaggtaatacttctacactgacagaagttttatttatggaaagatgcttacgacttctaaaaaaaggaggtcgtatggggatggtactcccagaaggcgttctaaacaataaaaacctgcagactgttagagaatattttgaaggaaaagcaaaaattattctgatttgctctatcccacaggatgtatttatagctgcaggcgcaactgtaaaaccaagtcttgtttttatgcgaagattcacaaatgatgaagaatctgaatatgcaaattgcaagtctgaagcacttgctgaagtaacagctttacaccaagcagaaattgacaaattagaagccactattgctaaagcagatgctctcacggaatcgcttaaagatgaccttaagaaggcaaagacaaagcttaagcaggcaaagaaggacaagaaaaatacaacatcagttgagacagaaataacaacaatcaaaaaagagcaagctgacaataggctaaataagaaaactgctgaaaaagaattgaaggaactttataagcagattgatgaagagacaaaaccggttgttaagaagaagtttgattatgatattcctattgcaaagattgatgatgctggaatcacaacgactggtgctgcatccgaaggaaatcagttaccgcagttagtagatgaatactcagattatagaatacagaataatttatggccagttttaaacaatgaaataatctatgccatgaataccgacggaaaatattgtaggtatattggtagtcaggaggtggtgttgaatgagcaataaaccagcgctactttcaactgttcctttttcttcattttcccaatgggatgtgaaacagttcttttttgcaaagatactttcaaaatatcccgtggaggaattaggaaaacatttaattcatcaaacagaaaaaatacaactatctgatgagcctaccaaagaattcaccatattaggcgtgtcaaataaaatcggtatgtttgatggttctactgaaaaaggaagcaaaattaaacaaaagtaccatgttgtaaaagataattggttagcctacaacccatatcgaattaatgtaggttcaataggaataaaaacacctaatttgaaaggtagttatataagtcctgcatatgttgtttttagttgtaaggatactattctacctgaatatttgtggctgatgatgaaaagtgatttcttcaataagcttatcaaggattctacaactggttcagttagacaaacattgcattttgaaaaactagcagctataaaagcccccgttcctaacgtgtctgaccaacagataattcttgacgcatatcatgctaagcttaatgaagcagaagaaaatatcaaaatggctaatgattacagcgatggtttattgctaagtattcaagctgacgtttcaaacttaaaagatgagcctccgaagaccccagaggttacaaatctagtgcagaccatatcattttctgatatgaacaggtgggaagttgcttacattctcaaggaaggaaaacttgaaaaagtgtataaaagcttcaaatatccttcttacgaaatatcacaattgcagaaagaatctttgtttggtctatcctcaaaggcttctttaacacaaaaagatggcatgattccgatgttaagaatgccaaacattgtaaacggtgaaatagattgtagtcagctaaaatacttacccaaaagtagtgccacaacggctaatgaaccagataaatggttgttaaaaaagggggattttctaatcaatcgtaccaatagcaaagagcttgttggcaaatctgcgatcttcaatctagatggagattatacttatgcttcttatcttattagatatagatttgatacaagccttgtgctcccagagtatgtgaatattctatttatgctgccattagtaaggaaacaaatagatgctgtaagtagacagacagcaggtcagtgtaatattaacagtgatgaaattggtgccattcgcatccctgttccttccattcctattcagcaagaaataattaaaaaatactttgatgccaaagatggtgctaacaattattacgctaaggccgatgaatgtaaaaccaatgctcttatcaattttgaaaaagaaatattttaataaacggataaagccacaatcccggtagtcttactaccaaagattgtggctttatctgttcaaactcttgtatatctgccatcgattagtagtaggttactactaaggactattcccaatttctcccactattctggcttatccgccatgagccttagtagtctaaatcgtagtaattccaaggctttccgccatattctaccccgcgttgccacagtctgcgaaggtatgcattatcataaaactggagtgccgtggcagatgaaaagtatttttatcattgttttgtttctccttgttttgccccggaatgccctgttttgcaagtgattccagggttattgtaaaatgctctgaaattacagattgtggcaaatcagagcagaaccctgcaagttgttactacctgttagtagtaaaaaagattatgccttactactaagcattttttcattctcccagacatctcttctaatattgcttccatccgggcactgttctaaacactgacctaaagcttggtaatgatctatataatagcattctctcgaagccataaactgaatatctttataatagttttcataattaaacattatttgttcaatcactcgtacttctattcttttatgcttatcatttagtgcctcaatcaccttatcattttgtagtaatccttttctaagtttaacaaaatgtgcatcatcgcctttcaaaaatcttttatagatattgactgttcttcctacatatgcacaatattccgtctgctgtttattatcaataatgaaaataccatatatccctctattttttgtacaatctataattcctctttcaaaaacaatcttgttatttccaagagtgtctatccattttaacgtaagatttttattatccatagaattcctctttatttaatattaaaatgaaaattgtactgtgtgcatcccttacggtaattttatcgtgaaaatcaagcataatttataaatatctcaccattacaacatgtctttctttataaaaaaaatttttacagagttaacttccttatcacaatttaacaaataagttatactgcgacatatttatatttatgataacgcaaaatagagttttctaaacaatcactatccatatgaagttccccaaccttatctttatttattataacttcaattgatgtaattccatcaaaatgttgaccaattgttttagaaggcgacaacattatttcaatatcactatcattctcaaattttatatcttctacccaatatttcttaatatgtatgccatcactgtcaaactctgcataaagtacaatgtcttgtttattctcgcactctcccatagcatgcccatcaactaccattttccctacatggtatctattacaaacaggctctgagttttttaacacaaaatcaatgctctccatcacatcaatatataatccaataaaattttcataatatccaatcaattcacttgtactttttgacttatatatattaccacgatacttaaaatcaggaatccgtatatctctttgtccagaaattacatccgcaaatgatgaacctccatataagtcaagtgtatgttttccataattatatacagaacgtatatagcaaacaatctcattctcccataatttttctacatagctatttatctgtggcattttttctaattttctatgcatacttccttcagtaacggctttctgtttcagtcctaaattaagtgacgcattaatatattgcaacaaacaatctagtgaatttgaaatatgcgatacccactccaatgtcaatttgttcaaaattgtatgagcattgtaattccatcccaatacctctacgctattataaaacggatttttttcaccctcactaatattctttttccctatgtcttcataaagttttgcagtaatgatggcatagtttaagtataattgtgatgaatataaaaactgacgtgcatctaagacacatttttctctcaaaaaattttcatattcttttccttgatagtatttcattttgtctgtatattcttgtttcattaaaatacatccttgtcttaaattttataaaaacattatatcgtcattttcacttcttttccatagaaaaaacgccccagcctaaaccagagcgttacctatcttacattttaaattaccttaaacatcttctgtgacatcagtttctctttcttctgctcaacctccgcctgtgccttgcctaaattgtatagttcttctttttgattatactcaattgcaattcaaaatgatttcgatttgtttttataaagccctctttttgtaactttgatatctctgtagacattgctgcacgatcaatacaaagataatctgccagttgctgcctatcaaaaggaatatcaaaagataacgacgaatgtctgatagattctgccgacagatatgataatagtttatctctcgtcgttcgcttcccaacatgtgtgatcttatcgttcagaatcagtatcttatttgccaggacactgaccagattacggatcagcttctgatgatgctcacatgcagttggacaggtaatcagaagtcttttgacatttaatagaataatctcacaatcctcatctgctaccacactgatatttaggacagctctctggcttgctgcatacggctcaccaaaaaaatctcctgcgtgacattttgacaaaatgtttcgatgtccccagatgtcttcttgaataatgaggacgcagccggacaccacaatccccattacttcggtaatatcacctgctctgaaaatataagaatctcgctttttagaaattgttgttgcgtttacacaatgcaatatggataatatctcgttatcagttagacctttaaaaaatggactgtttcttaggattggtaaatatttttgcaaaatagttcctccctgttggaaatcaaacatactagttgtattcataatactataattctagcataaacaaacgctaaatactattgacggaggttaaaaatgataagaaagattataaagattgataaagaaaaatgtaacggctgtggtgcctgtgcatctgcctgccacgaaggcgccattgatatcattgacggaaaagcagaattggtgagagaacatttctgcgacggactgggagattgtctccctgaatgccctaccggagccatctcatttgaggagagagacgcacctgcatatgatgaagaagccgtaaaagaagctcagaagaaaatagctgccaaaaaccgggcaatatcctctcactccggctgtcctggatctaaaatcatgcaaatcagacgaactgaaacatctgagccggtaaaatccacttcaaccgcagattcaggatcaaagcttcaaaactggccggtacagattaaactggctcctgttaatgcaccatattttaacggctcaaagcttttaatcgcagctgattgtactgcttacgcttatgccgcctttcatcaggattttattcgaaacaaggtaactttaattggttgtcctaaattagatcaggtggattatagtgaaaagctgactgctattattcaaaataacaacattcaaagtgtaactattgtccgaatggaagttccttgctgtggcggcctggagattgcggccaaaaaagctcttcaagctagtggaaaattcataccatggcaagttgtaacaataagtattgatgggaaaattatggaataaagtcagcaaccaccagttcaactggtggtttgctatagcccctctattaagcctccctgcacttctcatatgcaaaaagtgctgcaccaagcgctccgcaaagctgtgcctcatcgcaaatatacagctttgcgccgagcttttcttcaagcgcatttgtgatgcctttgttctttgccactccgcctgtcatcatatactctcccggattatcctgcccaagccttgctgcaagtgcacctacctttgaagctacagacatgtttagtccgtggataatatcagaaacagccttgttctgtgccaccagcgatactacctcagactctgcaaaaactgtacacatgcttgaaatcacaatgttttccttccactcaagtcccatggtgctcatctcctcaagtgaaagtccgagcgtccttgccatcatctccagaaaacgtccggttcctgccgcacatttatcgttcatcaggaaattcttcacagcaccattttcatctatactgattgcctttatatcctgtccacctatgtcaataactgtgcgcacgttgtgattcagataatgcgcgccctttgcatggcatgtaatctctgtgatgctgtcatcaccgctgttgatgtatgcacgaccatatcctgttgttacaatccttacaatatcatcctttgatataccggccttttcgacagccttctccagactcttttcggcgctcatcatagcaccgccacctgtcggaataatcattgtcgatttaatttttccgtcctgatccagtatcaccacatctgtgcttgttgagccgctgtcaattcctgctacatagtagactcctgattccatccttcttcttgcctcctcgcttatgccttttgtagggtccatgtcatctgagccctctattgtctctgcaaatgcctgtattcttgtcagaagctgcccggcactctggcttgtaaaatccgtctcaagctttaaaagaggcaccttaatattattctttatgcttgcatactcaaagccatagtaatcgcagaactttatcgtgtgatatatgatgcccttaaggcttgggtctaaaaagagctggtttcttcttgtattattgttcattctggcacatggcatctgtccgagcagactctctgcatatgctacaaagagagtctcatcatccatatttctaagatccttctgtaaaataatgagatttctgccggatgtgcatgtcatattttccacatccatctgcatattttcacgtattgtcttctcaagaatactgctcacatgcacacccataagacctatgtatggcttgcgctcagattcaggttttgcaaacgactttataaaaagctccctgtcgaatgtcctgtgcgaatatctctcgtacgcattcttcaaacgcagaattgactgtgcaaattttatattctcacactcgttatcctcatgaggcagatcaagcatatacaggaatttgcatttctttgtattctctatgatatcatagactctgcgcattgaatcacagcagttcactagcacaagttcctctaccttgccctcgagcacagcctgtatgactgatttgccgaatccgcagagattcgcatgagctatcttatctgatttatcgaaattctccggcatctcctcaagcacagcacattcctgcccaaagcccttaaacagctctaccggagcatatttacaaacataatttatcatctgttttccactttctgaaattggtttatagtaaatatccacacaccgcacgcaataaccggtgtattatttctaattacgttcctgctctgtaagcatctccacaaatgcctgaagccttgtggaaatctgtccgtcactggcatttgccggattgcagccgtctccgtctaaaaccatagttggaagtccttccctctcgagtgagcgctttataaggcttgatgcaccgattgtattcttacagccccagtgcgcaaaaagcactgccccatctgctccaactgtgtcggcaagctcctttgcctcctctattctctgattcacgctgccattataaatgcagtaaaccattttttcggcaagtgcctcgtaaggatcatccgactccatgcttctgaaaccatccgctataaaatcgcttgcactgatatggattgtatcactgtaattgaacacatccttcactgcatcctgtaaaaacggcatggtgtgcatccaaagtacatgaaagccatctcctgccggtgcacgtctcacatcatctctcagaagctgtgtatatctgactgattcatcagttcctgcaagcagatgacacatgaaaagcgcatacaactcatttgtgagagttgacgcaatatcatgtccttttctcaggtgaagctgcctgtaataattatttgatgcaattttgctcttgtccacagcctttttcacagactcctctgtgatttctcttccggtgacatcctgcaaaaaactcttaagctccctaagctgctttgctacatacataacagagtcataattcttctcatatggaacatctatataaaaacttggtatttcatatctctccttgagatacggaaatgtcatcatattgccatcgcatgccaggtttgtatacaccatgcactttggctttggcactataccgtttaaggctgcgcccagaaaaaccctgtgatacgagcacatagtttccggaaagccttccttctcggtctgtctgagaaaggcctgctcgcatttagttcctgcaataaagcacgataatgcctcaaccgaatatggtgtgagacctgccgccgtcaaaagctcacccggtacaaaaatactgaccatggcggcattttcaggctttgcaagtgcctgtatgatattattcatgacaatctttgccacatactgccctgacattggaagctttctgtccggaaataatgctaatctcttttcctgtaatctatatcctgcaagtaaaatcttcctcgccttgacaggatctttttctgctatctcgcctactttttctccaaatttatccaccatactcatgtgatatttcagctcttttctatattcaaatatatgtaaatattctgttcaccatactattatagcaattgtgcacaaaaagtaaactcccattttagctatatttcactataactattgtcagatatccttttgcttcggtaagctcatccagccccctgtacacacgctcagactccatgccacagtttgtcacaccatacactgtcattttcttttttctgatagcatctcctgtgcgaagcacctctataagctctgcaagcttctttccggatttcatgtatacacaggttccaccgtaacccacagtatccctcacatcatacgaagccggtatgatatgtatctcatccatcatctcaccaagcgaaatgccaagccgcgctgcagctgcacaaaacgacggcactatgccgtacacatagcattcctcttttgaaactgcagggattgcaattatatcacatgcttttatcgtattgatagccttcaaagtcataagctcgggatctcccggacctacaccgatgccatataacacaccaatattatttttattgtcatcaccggctctttctatctgcttgtccatctttataatttcctgctttctataccacatttacaagtaatgcattcctaacaaaatcatcacaaatcgatatcatatattcttcttgtatcaattaccgtctctgtaccattatcatccacaactatcatcaggtgccctatgctatcaagctttttaagataccctgtcacatgctcatagctgccaccctccttgtgctcatcgggcacaaaatatgtcacctcaaaataattctctgccatggtgtttatgacattttcgtcatataaactgtctgaattgaaattacgctttctataaagcatcatgagctcattcattttctcatcaagctctctttttttgtcctcatcaggctcatgccactcgtttgtcagcctcgctgtctctacaatagcctcctcatgacctgtaagtgccgcaaaaggtgcaaactgtgctgagcggtcccatatagacatctgcggatgtacctttgacacatgatgtggtaaatctataatatcatcatattttcccatgccatgctccttatatactttttcgtaactattttaaaccactaagaaaaatccgtttaagaaccacagcggttgctgctatgccttgtggccgccaatctgattgttccttgaaatagttgtggccccctcctcaagattcatgccctttagcatggcattctttccatatttcttcttgacggaaatcatagcctcctgaagctttctctccttggaaagcgcctcatcctcttttagcttttccttagccctctcctgataatctgtaaataaatcaagctgctcaaactgctcactttcctgcaccttgctctcatcacagaccctgtttgccaccacagtaatccttcgtgtcagaagagaaggatctatgatacggtcataaagctccatcacagcatccatgatgatgcgcgtggatgacgtataacgccctaaatttgctgtaccatgtgcatgctttggaacctttctgccgtatcggtctatggtaatctcacctgtataatctctgtgtgtaccttttttaccgccaatactgtctctgcctttattatttactgcgtggtcataattattgccaaaacagctatcagccttattagacagatttgcaatatcataccctatagtgagtactatctggtctgtaaccagcctcttatctaccagatcaagcacaagaaggtccgtcatctcacgcacaataagctttgtcttctcataatcatacggctcctgaagcacctgccctgagctgatgctgttggtctgcggtctgtatgccttgatatcagctattgtaacaggctcatacccccatgcatggtctataagaagctctgcattgatgccaaacatcttatacagcttttcctcattgtaaaaatcattcgaaccacctgttgagcacctggccacatctcccattgtatacatgccggctgcctcgagctttttggcataacctgctcccactctccaaaaatcggtaatcggcctgtggtcccatagctttcgcctatagctattctcattaagctctgctatacgcacgcctcgctcatcaggcatggcatgctttgccataatatccatggctatcttgcacagatacagattggtaccaatgccgcaggttgccgtgataccggtatccttaaggacatcgtctatcatcttagacgcaagctcccttgccgtcatgttataagtgcgaagatagtgtgtcacatccataaaaacctcatctatcgagtaaacactgatatcctcaggtgcgatatacttaagataaatattgtatatgcgtgtactataatccatatacaaagccatacgcggcggtgcaacaatgtatgtcagctcatactcaggatgtgcgtcaagcagcttcgcattatatgatgcataatcaaagcctgccattgtgctttctgttatatcattttctgctatatcaatttctgttacatatttttttctttcatccggattgccctcagcctggagtcttttttgctgttcacctgctgattgttttctatcagattgttcgccctcaatttgtcggcttctctccactgtcccggcagcatgtccactcgccataagcttcgacagacgcagcttgtttacctccttcacacgctgtaccacctcaaaaaggcgcgccctgcccggtatgccatatgccttaagagccggcgatactgcaagacagatagtcttctccgtgcgggttggatctgccacgaccagattagtggccagagcatcctttcccctctctctgcactctactgatgcgtaaaatgattttaaatctattgccacataaatgtgctcttcattatgcttgtccatattatgattttacatggattatgtttaaatgtcaagaacatatgtttgtatatataaattattgtcaccacataagaaaatgccgctacagcacagtttaatgtatctgcaagccttacgcagtcacttagtggctgttagaattatatccgcacacaacaatgccccgccaaggatggcggggcaaggcgttatgtgccatggacggcacataaaagccggttgtgtcatggtctataacaaactgaatatataattcttacagcctcttagtgacgcagtaccggcttacggatgcattaaactgtgctgtagtggcattttcgtactataaccattatgaaccactaagctttaaacactacactacaaggaagaacttcacaaggaaaagaagcgaaatagcataagtaaggatagaaacctcctttgcttttcctgtaaagaccttgagtacagtatatgtgataagtccaagacctataccatgtccgatagatccggagataggcattgcaataagcatgagtgctaccggagcaacctgtgagagatcctcgaaatccaccttcttaagaccgccaagcatcaggataccaacatagataagtgctgatgatgttgctgcggcaggaatgattgctgcaagcggtgctataaagatgcatgcaaggaacaggatacctgttgtgaaagctgtaagacctgttcgtccaccggcctctacacctgatgcagactcaacaaaagttgttactgtagatgtacctgttacggcaccaaccactgtggcaactgaatcggaaaccaaagcctccttcatgtttggcatatttccctctttgtcaaccattcctgctcgtgatgcagtaccaacaagtgttccgatggtatcaaacatatctatgatacagaatgtgatgatgagtgaaattgctgtaaaccatccaatactgatgaaatccttgaaatcgaacttgaacagtgttgtatctgccatatccttaaactgtggcacaaatgaagctgttgcaagtgatgcaaaaggatttgttccaaagaatatagcctctcctacccagtaaactacgcaggctgcaagcataccaaaaagtactgctccgttgacgcccttatgagctaaaataatgataacaaaaagtccgatgaacatagtcacaacagtgagcaccattgaagaatatccatctgtcatatttgttttggcaagtcccggtgtgagtgcaccgaagaaatccttcatcacataaaatggtccgccatcctttgagtaaacaccggcatttgagccaaagccgatatttaaaagcataagaccgatagccggtgaaatacccatgcggacaccataaggaatggcatctactatcttgtcacggatattaaatattgaaagtatgaagaataaaataccctcaataaggatgatacacagtgcagcctggaatgaatcaacatatgacagacctgtgatgcttacgatattggcaactactacagcaaagaagctgttaagtcccatacccggagccagtgcaaatggcttgttggcaagaaatgccatgacaaacataccgactgccgaagcaatacatgttgccaggaacactccgttccatagtgcttttgttccctcagcaccaaatccggtgaggaggtttgggttaagagcaatgatgtatgccatggtcatgaatgttgtcagaccggcaagaatctctgtcttgaccgttgtgttgttttgtttgagtttgaagattttttctaacatttttcttcctttccttttattttttttgcagctgttatccgctttcctgctacaggcgcctgttaatagctgcattgtatataaaattgtgaatcacaattgattccttgttttttccacgaactcactcgtgaaaacatcaagtgtaaccggctttgaatagaaatagccctgaataatattacagccaaactgctgtaatagccttacctgctcctcattctcagccccctcggcaacacactctatgccaagctccataatcatggatatgaggtgctttaacataatcctgctcttctcattgctctcgagattcttgaccatggaacggtcaattttagcaatgctgaacggaaacttaaagagcatctcaagatttgagtacttcgtgccaaagtcatccatcgaaagacgaaagcccattgaaatcagcgactgcgcgatattatttatcaatacaatatccatatcaccaacagactctgttatctctatctgaacaagcccctccggtagatcatacctgttcattatctccttcacctgatccaggaggtctgcatattccagtgtattttttgagaaattcacagataccggaaccactctcctgtcacttatacagcgaagcttctgcgccttgcatacctcatcaagtacaaataaatcaataagatgcgagcatctgttttcttctaaaatctcgataaaatgaattggccctacaacgccatgagcctcatcaaaaaatctgataagggcctccgccccgactgtgatgcctgttcttgaatcaaccttcggctgataatacaccatgaagcttcccttttcaatctcagaaaccacatccttaaataccttatttctcattatactgtcaagactcttaagctttgcgtccttttcaatatcatacattaagcgaacctctgagagctgccttgctatgtcgggcttgtccgtccaactaaagcctgtcgatactgagacatccagatcatcaaggctttcccttactatcctgacaagtcccataaatgattttttatcaatatccttgcaaaaaacaactatctcatcctgctcgtacctgtatatatcatagcctgtaaaaacgcccctgatcacatctgcaaccatcctaagacgcgcatttcctgccatatacccaaatttttcatttatatctgaaagccttatgatatctgatgcaaatactcccataaagctgcagtcatactccacatagctctctcccaaattattaaaggtctctctctttcttaagcctgtgacctggtcaaaattgagcctgtactcatactctgccctcgccttctcataaaacagactattcgatattgaaataccaatcatttcaatcaaatccagacttcctgaattggctcttggattcataaccacgatgacaccaaagcattgttcccccttgtttagaagaacagcagatgtagaccatattctgacatcagccatacgcttgaataaatccctgtattcaccctcaattgactgaatatcacttataaacacacggccggtgtcattaaacagagcgagaaaatctgtaattgcacctcttgaaacagattcattaaccacctttgccataatcttagcacttggtatatgtatctcctcaattgtgtcccacgcactctctccattataaatgacagccacacaatctgcattataaaactctctaagcagccgtaaatagttcttataccccaagccttcagtggtatcattaacagcatcaatgaaattctgcataaacgccctgtagctgattatccgtctcataacagcattcagctttgactcatcactcaaatctatcatcttgagcagtctatagccattataatccttatgattcagcttgattatgagcttcttttcgcctaaaagctttgcaactatattgtcgggatgatcctttcctgaaaaaaccgatactctgtttccctgctcttttttccgtaaaaacaaatcaataaacccatcctcaaacggctttgaaataaattcatcaatctgagatgctgtcataacgcttgaatttctgatagccttattgacaaatactattctacggctctcctcatctactgcaagtatatagtccggcatttcatcatacgagaatatctccctatctgacatcctgcaggatacatctgtaatggaaggagcgcaggaattatgcggaacggttatatcatttttcctgatagaattgaaaaacgatatgcgattctttccctgcctctttgagtaatacatagcctgatccgcctcatagtacagatccttaaaggtcagctctctgtcatcgccggtagtcatgccgattgatgcagaatactccatatcaaagataatattcttcagtcttcctgacagctttacgcagaactcgtccacagcatcactgtcctctaatccaaatacgatcgctgcaaactcatcaccgccaagcctgccaactataccattggctccaactgcttccttaagcacctgtcctgtctggcttaataccctatcccctacattgtgtcccaaggtgtcatttactatcttgaaatcatccacatcaagcatcacaaataaaagctttgttcccttttgcctgataagtgatgtacatttattctcaaatgcaaggtgattgtatgttcctgtcagcgagtccaaaagcccattttcatctctgatatcaaacattactccaactaccatacatacctttttatccaaatcaggtatgctgaccatgtacatctcaaccggcttgctcttgccatcctctgatataaaactaagctggaatgcagtacgcataggccgaagcagacatttatcaagctgctttttgaagcattcgatgctgtctgccggacactctgacatgtatgtgtcaatattttgtttaaaaaccggatatactgtctcctgagccggagaagagttgactattttgaaaatatatgcctcatcatcttccacatagtactcaaacatgcgctcatgattgttttctgcaacaatcttcatcagctcatagtaagcctctgttattctatctgtaattcttctccctctgttacgcttatcttccatgcggaaaccccattatctacaacatattcataaactttgcttcaaactaaattcttatcagtgcttttcaatttcctcaaatactctgtcagccacccgcggcagctcagagaatttgcgaatagcaggcacatcgtcatctattgtgccgaacccgtatgctgcatggatgaacttaactcctgcctttttgctggaatcgtagtctccctgtatgtcacctacatacactgcctcatctatattattgcgctctacaataagctttatgttttctgacttctcaagctcattgttgccgtagcactcagtatccttaaaatacctgccaagtccgtggtacgcaaaaaaagactctatataaccacgctggcaattgctgactatataaaggtcatatctttctgacagctcatcaagtgtcttttcaacatcaggataaagctctcccccatgaacggtcaggtaatcgttttcttctctatagcatacattaattaactcatctctgcaagtacaattaggaaagataatggatgccagcacatccattgtctttcccattactgaatacatatcttcttttgtgataggtgccctctcatagccataatctgctatggccttattccatgattttgccacattctctgctgaatcccagagagtgccatccatatcaaaaataatacccttatgcttcatctattgcctttccgatatcatgtctcatgtatttattatcaaactgtacccactctgttgcctcgtaagccttggctctggcctccttaagcgtggcgcctgttgcagtgataccaagcacacgtcctccgtttgtgacgatatttccgtcatcatcaaatttggtgccggcatgatagcagtaataatcatctttgccgtcaaacttctcaaagccagttatcttaaagcccttctcatacttgacaggatatccgtctgatgcaagaaccacgcaaacgcatgcattatcctcgaactgcaagtcgattgtgtcaagagttccgtctacacaggcctccatcacatcaatgatatcattcttcatacgaggaagcacaacctgcgcctcaggatctccgaatcttgcattgtactcaagcacctttggtccatcctctgtgagcatgagtccgaagaagataactcctgtaaaaggtctgccctctttagccatagcatctacagttgcctgataaatatacttcttgcagaaatcatcgacctcatcggtatagaacgggctaggtgagaaattgcccatgccgcctgtattaaggcctgtatcaccatcgcctgcacgcttgtgatcctgcgcagatgacataatcttgatagtctttccgtctacaaatgaaagcactgaaacctcacggcctgtcatgaactcctcaactaccatggtgtttccggctgttccgaacttcttatcctccatgatggttctgacaccctcttttgcctcctcaagagtattacagataagcacaccctttccaagagcaagtccgtctgcctttaacacgatagggaactttgctgtctctaaatatttaagtgcctctttggcatcagtaaaattctcatatgccgcagtagggatattatactttttcatgaggtcctttgaaaatgcctttgagccctcaagaatagccgcattcttctttggtccgaagcacttgagccctgccttttcgaactcatcaacgatacctcctacaagcggatcatccataccgatgattgtaaaatcaatggcattatcctttgcaaatgatacgagcttatcaaattccatcgcaccgattggcacacactctgcaagtgctgcgatacctgcattgcccggtgcacagtatatcttgtcaacgcgtgagctctttgcaacagccctgcatattgcatgctctcttccgccacttcctactactaataccttcatttttgcctcctatacctaagctatatataagcttttcattgtccggtaatcataatctacctgtgtttacatactaattacttacagcactgtcattacttctaatctataataacatgtccgtcttctactgacaccctgccatttgctatcaggtcgatagcgtgtggcatgattttccactcagcctgctccataaccctgcgctgaagcacctcaggtgtgtcgccctgctttacctcgactgccttctgtaaaataatagggcctgtgtctgtgccttcatccacaaagtggcaggttgcacctgtcaccttcacaccgcgtgcaagcactccctcatgcaccttaagaccatagtagcctgtgccgcagaaagatggtatgagcgatggatggatatttatgattctgtttctgtactgctttatcatctcaggtggaatcactaccagaaagcctgccagtacgactaaatccacatgatatgagttaagctgctttaagaaatcttcattgaaggcagctctgctttcatagctctttggcgagatgcatactgcctttattccagcctttttagctctctcaagtgcatatgcatctgcgttgttgctgataacaacctctatctgtgtgtttgtaattgttccgttatctattgcatctatgatggcctgaagattggtgccgccacccgatacacatactgcaattttcattctttttcctcgcaacgatgtatacaattattaacaatatattgaatgttattatacgagatctacacccttctcgccgtcaataatctttccgactacgtatggtgtatctccggcagacttcatagcctccatagtcttgtccacgtctgcagggtcaactgcgacaatcattccaagtcccatgttgtaggtattgtacatcatctgctcctcgacatttccctctctagccatcattttaaagattggtggaacagggtagctgtttttctcaactacggcacgtttgccgtcgataagcatacgtgggatattctcatagaagccgccgcctgtgatatggctgcaggcctttactgtgactcctgcgtcctttacagccttaagagcctttacatagattcttgtaggggcaagaagtgcctctccaagtgtagtgccaagctcctcatgatatgtatttaatgtctccttgtccatcttgaaaatctttctgacaagtgaaaatccatttgagtgtacgcctgttgatgccattccgataagtacatcaccatcctttaatccctcgcctgtgatgatgtcctttctgtcaaccacaccaactgcaaagcctgcaaggtcatactcgtcctcaggcataagacccggatgctctgctgtctcaccaccaacgagtgcacagcctgactgcttacagccctctgccacaccgcttacgattgtagcaatcttctccggatagttctttccacatgctatataatcaaggaaaaataatggctcaccgcctgcacatgccacatcatttacacacatggcaactgcatcgattccgattgtatcatgcttgtccatgatgaaagcaagctttaccttagttccgcagccatctgttcccgataaaagcaccggatcctccatatccttgatggaagcaagtgagaacgctcctgagaagcctccgagaccacctaacacctccggcctcatagtctcctttacatgctttttcataagctctactgacttgtaacctgcctcgatatcaacacctgaattcttgtaatccattattgttcctcctaataatctgcaattcgttcaatacctatagtataccttcatagtgctaaattttccaattatatattgtaattattcttattagttttactaatataatatatcttttatagaaataatacttataatttatttcacggattatattgacatcagacattcatcgtcctacactatccatgcaaataaatatttagatttgaacgattaataatacaaaagaaagctatgatacacagcactgcaataaatacctgacaagctgtcaaatcataaaggagaacaacaaatgcttaaacagataaaaaattttctgataatgacactcagtatcaccatcatggcaatcggtgtatactatttcaagttcccaaacaacttcaccttcggtggcgtaaccggtgccgcagttgtttttgcaaagataacaccgctctcagcgagtatgttttctactattgtgaacatgcttctgcttgtagtgggctttttcttccttggcaaagactttgctattaagaccacctatgccacaatacttttgtctgttgagctcctggtacttgaaaaacttgacccgctcactcatcctctctcaaacgagccaatgcttgagctgatttttgccatcgctcttcctgcaatcgcatctgcactgcttttctatgtgggtgcttcaagtggcggaaccgatgtcatcgccatgattgtaaaaaaatatgcacatgtagaaaatattggcatggctttatttctcaccgacctcgtcatgattatcatcgcctgctttgtatttgacataaagactgctctgtattcatttgtcggacttgttgtgaaatcatttatgattgatgcaatcatcgaaaatatcatgctcagaaaatccataatgcttatctgcgatgacaaggatgtgatatgcgattatattactaacacgctggagaaaagtgccacctatgtggaggcacgaggtgcttacaccggtgagagaaactatatcgttttcagcactctcacaaagaagcaggccatagagcttagaagcttcatacatcagaataagctgcacgcttttatgtctgtgatgagcaccagtgaagtatttggtaagggattttcttctctgtaaattttatagtagcatcatgcaatagtccagtcttcaagctttaatccagcaacacgacaaaattctcttgtattatttgtcacaagaataaggtctttggacaaagcatgcgctgcaatcaaagtatccattggcccgattggtgttcccatagtttcaagtccagcacgcaccagaccatacttttccgctgcaataccatcaaattgtaaaattgtaattgatgataaaaacagagagagcgcaagataatttttttcgcgatacgtgcttttctccacaccgtgcattaattcgccgtagctaattgctgatatacataattcatctgatttgtgtgataaaatatgctttattacttccttaggtttattttttattgcatatatgcaaatattcgtatccaacatgtatttcataaaaaccccttttcattaaaaactttctcgtacctgtacttctggctgcatgcgtccttctttcatgaaatcatctgtaaacatatccagactactaagcaggcccgcccactcattatctttaggtattagaaaaaccacatctccgactttatttatcataacctcgtctccttcaaaacgacattccttaggtaatctaactgcctggcttcgcccattctcaaatagcttagctgttaacataatagaacacctccttttgcatttagtatatatcacggtatatatcgtgtcaaccagtttttaatatggcatttatcttttatcacaaaacagccgtaaccgcgattttctttttcaatcgcagctacggctgttatatttacatgaactaatttatttcaaaaactagtgcttcggaataagcttctctgtaccacccatgtatggctgaagtgccttagggatatttacagagccatctgcattcaggttgttctcaaggaatgcgataagcatacgtggtggagcaacaactgtgttgttaagagtatgtgcaaagtatttcttgccatcctcgccctttacacgaatcttaagacgtcttgcctgtgcatcgcctaagttagagcagcttccaacctcgaagtacttcttctgtcttggtgaccatgcctctacgtcgcatgatttaaccttgagatctgcgaggtctcctgaacagcactcaagagtacggacaggcacatcgagacttctgaaaagctctactgtgtacttccacatcttctcataccattcctttgaatcctgtggcttgcagacaacaatcatctcctgcttctcaaactgatggatacggtaaacacctctctcctcaatgccgtgtgcacccttttccttacggaagcaaggtgagtagcttgtgagtgtgtatggaagctttgactcatcgtttattgtatcgatgaacttaccgatcattgagtgctcagatgtgccgataaggtagagatcctctccctcaatcttgtacatcatggcatccatctcctcaaagctcataacgcctgttacgacatttgaacggatcatgaatggtgggatacagtatgtaaagccctttccaatcatgaagtcacgcgcatatgctgtcatggctgagtgaagacgtgcgatatctcccatcagataatagaaaccgtttcctgcaacctttcctgctgcatcgaggtctattccgtcaaatctctccatgatatctgtatgataaggaatctcgaaatcaggaacaacaggctcaccaaacttctcgttctccacgttgaaggtatcatcctttccgattggaactgatggatcgatgatgtttggaatcttcatcatatcctcaagcaccttgtcctgatactctttctcgagcggctcaagctctgtgaggcgctttgaaatctgtgctacctcagcctttacagcctcagcctcttccttcttgccctgtgccataagagcaccaatctgcttagagacctgattcttctttgcacgaagatcatctgcctcctgctgtgcttctctggccttcttgtcatactcgattacttcatcaacgagcggaagcttgtggtcctggaatttctttttaatattttcttttacgagatccggattctctcttaaaaactttaagtctatcataattcctccaaagtattatgtttttataacttataacattttactctgaaaacccttaaaatgcaagaggatacttgtcagtaagtgtcttgatgatagcctttgcaggctcaactgcgctctcgccctctttgatgatcatggcgattgcctctgcaaccttgtcaaaatcatcctcctttaagcctcttgatgtagcagcaggtgttccgagacggataccgcttgtgacaaatggcttctgtgggtcgttaggaatagtattcttgttggctgtgatatgagccgcatcgagaagcttctcgattgattttcctgtgagaccaaacggagttaagtctacaagcatgaggtggttgtctgtgccgtctgatacaatcttgatgccacggctctgaaggcccttgcaaagtgcctgtgcgttctttacgatctgcttctgatactccttgaactcaggctgtaatgcctccttgaagcagactgcctttgcagcaataacgtgcatgagaggtccaccctggattcccgggaaaatagccttgttgaaattgtacttatcctgcatctcctgactgcagagaatcattcctcctcgaggtccgcggagagtcttgtgtgtagtggttgtggtgacatgtgcatatgggattgggcttggatgaagtcctgcggctacaagtcctgcaatatgagccatatcaaccatgagcactgcgtctaccttgtctgcaatctctctgaaacgcttgaaatctatagttctcgcatatgcagatgcacctgcgataatcatctttggcttgcactcaagggcgatctcctctaccttgtcgtaatcgatgaagccctcgtcatttactccataaggcactacatggaaatatgagcctgagaagttgaccggtgaaccatgtgtgaggtgtccgccgtggtcaagattcattcccataatggtatcgcccggctttaagatggcgaactgtactgccatgttggcctgagcacctgagtgcggctgtacatttacatactctgcgccgaaaagctccttggctctttctctggcaagctcctctacctcgtccacgcactcgcagccgccatagtatcttcttcccggatatccctcagcgtacttattggtgaggatgcttcccatagctgacataacagcagggcttacccagttctcagaagcaataagctcgatgtggctgttctggcgctcaaattcgtctgtgatggcgcttgcaatctcctgatcttctttcttgatgtcgtcaagtgtatacatatatgtgtctccttttctttattgcaaaatacttgcattatttatcgcaattatatgctttgctgtgatttattactttgatgcgctaccgcgcaaaaataatccttgctacaattctactatttaaagtaaaaagtagcaaggattatttgatatatccttcatatttaattctaataagtaactatacccaaatcaaataactaaatcacatatatgaatacatttaaaaaatacggtcatcctataaaaaaggaggtctgaaaacatgactactgaccaaaaagaaaaacgaaatgatgaatataacaaatatgtaaagcgcgtcacacctactcactgcctttctgcaaacatgctaaaggcatttatactcggcggcatcatatgcactatcggacagctcatagtaaatacctgcacacaatactttgggttaagcagcgaggaagcctctgcctggtgcagcatgattttgattctcataagctgcgtactgacagcgctaaacctgtatgcaccgcttgcaaactggggaggtgccggtgctctcgttcctataacaggctttgcaaacggagtatgctcatccgcatgtgaatttcaggtggaggggcaggtatttggcataggctgtcagatatttaggattgcaggtcctgtgatactgtacggcatattttcaagctgggtgcttggtgtgatataccttgttgtaacgggcttgtgattgattagagatgtaatcggcacagtcaggataattcccattgtgcctgatatttctcgcattatctcaattgccataatattctgtattgccttgttccttctataccatcacagtctatgttcccatcatagcagatattcttttgtaccaaatcatttctttcttatttctatagcatcttctatttcttctttggttaattccaccacaatatctgctatcagatcaactgaatatccctcttcatacatgttaaaaaccatttgtttgcgcatttctttttcaaagccctttttataccctctcaggaagccctctgcatacgcatcggctctctcgagttcaagctgcctgtcgaattcataatttaataatgccatgtttaaacttataatcaaatttattgattatctttcccctttttatatacttcttccatatattctataaactcaactctttcaggattctcatatcctctaaatacaacatcatttacatcagaatgattaaacaaaaaattgaactcatcatttaggtaaccttccggatatattactcctatatagtcatattcttgttctgtgccatcatcatcttttgatactggtttaataccagtaaccattatttttttaattccaccttttaataacactacacttcctatcggcaataattctttaaacatgtctacctccattatccttacattacataccatatgctttattcaattcatcataaacagtccaaactgtctgtgcagctttacctgctttttctgccactttacaaaaacctgatactactttttttcctacaagttcagctgcgccacatcccgcagctaatcctcgcaatactataggattatttttatttccaatatattgaacaagcttactattactgttaaccatatttgtaacatcatcttcaagttctttagctgttttatcaccatcgaaagatacaactccaaaagtcactgaacttgccaacttactcagaccatttgttgcagaataaatacctacagacgcaccatccacaatatcaacttttccatctttggatacctgtccataacgcttcactccactagaaactgcactaacacctgcatcaaatatatcaatatatgtactcgccgttgaaattttctttccaactgttgcagcagttgtgtattttaatgatgattcagttgctaaaatctgattttttactcctttagaacagtcttctaagttattcactattcgtaaagattttgtactagacatttttgcaatttttagttttccataaaaatcagctaatgaacctcctacattaatcgcctgaccaactttgtcatatgcgttactattttcatcaaccattacatcatgcatttttacactattctcaccaatttcagcaacactcgaaattgcagacagtacaatatttccttttccatatttttcacctaattttgatgcttcatatggtgtcaagtcaaactatcaatttgtccattcatttttctagtacatgatttatataacttgagtgagtttgctgtttttccctccttaattgcagaacgaatgacttcatcaagaattttttgatattccgtaaatatatcctccagttcagccgcacattccgaattaaacttcacaacttcattgatataattctcgtcaaatttcaaattactcatgaacgttcctcctaacaaaactatttaccaacataacgcatttgattattcaaataatctatattacaagagaatctttttatcgaactataattattactgatttgattctgtaattttcttatctgactattaaccttatcaatagacctgtatatctcattacatgctttcctatactcacttccatttactaccccatgcatggcagaagtatatgaacttacaatttttgaattaatatatgacatattatttatatctgaaattctagcgttttgcatattatgtttataattaaaatcataaagcaatctattaaaactattcctgagtccttcaagattttcaatctgtgactcctgctcatttatagtggttcgaatatttccaatttgattctgattgtaaatgagctttttccttatatcatctctcgtcatctcgcacaccctctctcaagaagttgtaatggtactttattcttatttcattttgtcactatttttatcttttgttaatactatatttacacacagtaaatatagatagcatttaatatacgctaaaatagccggcacaaaagtgccggctattttagcgtacttaataattctattttacaattgaaaaggtcaaacgactaaagcattccttagcagatttttctgaaacattgtttccaattaaaatacctgttttagaatctttgaggtgaattgcataatcatattcctcatcattgttattccacatgatatactcgtatgtttcattatctcctttgtcaataacggttgctgtgtctgtgtcattaaccacactgacatatgaatcataatcatcagctgtaataaaagtaccctggctcaaggttttattatcctttgatataacaaatggtaaatcagaggtaatatcatatccatctgctgtattcagctcaacctttacctgatcccctgtatcaaccttgaatgtatatgcttttgacgaattagtagaacaagcacaacagccaattacaactcctacaattaacaccatacaactaagcttctttaataaatttttcattttttattctccttttaactctctaatttttgtatctgccatttgtttaaatgccatctgttcttcatcttgatatcccaaagcatatacatgtgaaatttactcacgattgaataaaaacattttctctgcatctaaatatccctccggaaagataacgccgtatagtcccatattgcattaggatcctgaccacctttctgacagacaccaacaatcataactttctttttactatttccaattaagactacacttccaataggtaattattcataatatatcctagattaattttttaccataaaaatacatataacaataattaccaatataccaaacgatgccaataatctcaaatcacctgacaaatcatccttgcaaggaacaatattttcatctaaaatttcaaccaatctatttcttcctttgggtgtttcccaataattcacagaaacttttttcccattaggtaaactttttgttttagatgaataatgaatagattgtgcttttactatattaccatttaattcaacattcacaatatacataacatttcctccatcactataaattgtttgatctatgactcctgttgtacttattttatccatgaactatttaaaccagtttgttgcggttttccctcctttctctaatccattccatgcagactcggcagcataacaaacagtatctaccatacctccaatatctacctctgatcctacagaacccctccaatccaatagaagctcctatatcaaatttgaatactccatctttgtaacccacatccgcatgtgcacctactccaacacttacacttccactaacaccaacttcacctccaagtacatttactcctaatgagccttccagctcagccgcggtggcttcagcttttgcactagctccgaattgaggtttaagttttccatcttcaccatataactgaacaccaatatctgctttggctccagcatccccagccttaactgttagtagacagtccttcttttttattttaaattttgccactttaattactatgtgtcaacattttctttactaacagttaatattttcataatatatacacatacttattttatactttatcttttcagttatcatatttttgtttactcccaataaatctactgttctaaaatcctaatacaatttcatatattataaattaattttgggaagttttatgaatagttacaacattgacgctcaggcgctgggtgagcgcatccgcaaattacggcttaagaagaataagacacaggcctattttgctgatattctttacatatcaccatcatatttagcattaattgaagccggcaagcgagttccaaatttggatgttcttgttcatatagctgaaatcactgatgtttccatcgattacctgattttcggtgataacaaagaaccaaattcactacagctcacattagaaaggctaaacaagtcttatcccccaacgcaatgtagaacatgcccttatgcttgccgaatactatttgaaactcgaaaaaggacttttcgataccaaagattctacaaattgatattttttcccattgccaatccccttccttatttctataatattcacataccatatattcaaatgcagcatattaagaaaggggattttcaatggacactttatcagaagtttttaaggctatcgcaagctacccatggcaggtaaatgtgggtgtgctttcactaataccactgtacatcatagattttaagtttttcgacaaactaaatattggtttacagcgcaagatagcacttgaaaaggaacgcggacatgtggcgagaggcatgattgtgaaggaggatgcaaagaggctcgttgttaataattcacaatccgcttacagctactgggctgccagatacacatatactgtagacggaaaagagtaccgcaagcgtttttcatgcgataacagacatagcacccgttctgagcttaggactatcataaatgtgtactggcttgatgacccgaacaagcctttctgggattatagcagcgattcacttggcgcatggtttggaatttttacgatgttgtttccatggattggggctatacttatcatactgctgttaggcggtgccgatgcaatagcgcagtacaacaacagtcggatgtgatactttttggcaaaaaaatccgctataccaaatacaatggttagcggatttttgctatttacattttgataaattattcatgcctgatgctacacagtctcaggcaccttatagcctgcttcactcattaatttttcaaactcactgacactgacaccggcttcctctgctgcagtatcaatatcgagcttgccctttgttactaaagtaaacagcatcttattttctcctatttccatcccctcttcgatagcatcagctctttcaagctcaagctgcctgtcaaattcataatttaactgcatactcttcgtcacctcacttctgtaagtctttagaaactccttcagaatatcattgtcaatacaatagtctatagccttctcaatatctatagcaagatcatcaaatgccccgtctgcatgatactctctgaccttatttacaaatgtcatataatcattcagccagccacaggactccataatagccttgttctttccgtcgtttatattgtacaccttacatttaagctcaagattcggctcgtcggtcggcttctcaaacgcatcggacagcttaagctcctgaacctccggctgttcctcctcaccattgtaaaataccacaaaatgtggtgtcggtatctttaccagtcttctgccatagatgttcttgccactttttgttccttttttcttgtcgctgagcatatctgacaatatcacactaaaataaataagacttctcaccggcatattcggacaaactgtggactgatgctcatatatgctcagtctcgcatccacgataaacgatgcatcatttctgaccgaaagtgaaatgccgccatcgtgaatcaccatctcaacatcctccggattgtcatagctagacccattcattgcgttatacagctgtaaggctctttccttatcctgcatcagcatactgaaaacatcacttttgtactctctgttaccactcatataaaatcctccttcatttgaaaacactaaagcaggaaatatctgtgtagtaaaagccctcttatcctgctttaaataaaataatgaaacatttaaaagcaagaatttcagggaatatgaaaaaaaattaaggtattgaagaccctgcacgcccttatcgccggacgacatcttattatgcctcacatatttacagagcatatagtcatatctgtaattaatgtgccaacgaccgcacaggttgctatagaaaaactgctttgactatattttaacatatgtgaaagaaatagcaagcggtttgtattttattatattgtttttgttgtatatgcaacatatttttggacaaaattatagtaatattgtattataaataatgaaatcaacattcaagaaagaaggacaagaaatcctatggacaaggttttcaaaatagaagatttacgccctatccgcgacgagatgaccgtctcacgaaattcaaggcttagtgacaaaacacccataacctatttttctctcggaaagggcacgtcaatctctcaggaatcctacgataataccactgtatacatcggtgcaaaaggatgcgctgattttcttatcggagattatgctgcaaaacataccatatcagaaggtgatatgctggtagtcccttcgaaaacactctgcggagtaacaacagaaaccggctgtatttacatcgaaatcatcataaaaaaggagaacaacaatatgaacaaaattatcaaatcaggcgaggtcatgaagcttaatgatcttatctcatatgaggatggcagtatcactaacattgatgtggtaagcaacgacacaatgaaattcgtgcttatggcatttgatgagggcaccggtctcacaccgcatcgcgcgcctggaaatgcaataattttcgcactcgagggcaaggctgtaatagactacgagggcaaagattacacaatctcagcaggcgaaaatttccgttttgacaaaaacggactgcacagcgtaaccgctgacgaaaggttcaagatgggacttcttctggtgttggagtaaagcacattaaaaagcacaaaaaatccgctataccaaatacaatggttagcggatttttgctatttacattttgataaattattcatgcctgatgctacacagtctccggcaccttatagcctgcttcattcattaatttttcaaactcactgacactgacaccggcttcctctgctgcagtatcaatatcgagcttgccctttgttaccagagtaaacaacatcttattctccccctgttgtattccaagctttttatgatcttcccatgccttacacacattaatcacctcttccttttcttcatactcaatatctgttcctgcaaacaaattcattgctgctattgtctcaacatcgacttttttaaaaatatcatctgtcgtgattaaatcatttagttttctttcatctgatgcattattctacacctgacatattattttcctgctatttactggtatcttaaagcatcgaaaatttccatgtcctttgtagaatgatgcgaagtggtctgccctcttcaaagtgatacgcaccaattattgacgtgttatgtggtaacgctctacagaaatataatgctttaactaaattgtaacatagggatattcttttgtcattatgaaaatcaatgtattttataatttatatatattatatttacacgtattgaatttatacgtatcatatgttatattatatatatactaaagaaaggtggataaaaatatgccgatcaaaccaactgaaatggaacgtataatacttgccgatgggtggattttcaaaaaccaaaccggatcacatcggcattatattcatccttcaaagcccggaaaagtaactattccttttcataaaggcaaagaactgaacaaaatcactgaaaattctatccgtaagcaagcgggaatcaaataatcataaggaggtatactcatcatgttatcaatatatccggcatgtttttttaaggaagataatggatactctgtaatctttcctgatttaaattatcttgcaacacaaggagatacccttgaagatgctgtggccatggctgttgattgtcttgcaggatatctgtatacggctaagatggataatgaaaaatttcctaaagcatccaaattatctgatatcaatattgacagactatctgacgaattagacataacaggaacatataccgatgcatttaccaatatggtttcagtagatgttaaggcatatgccaaagagcatttcgataaatcggtccgaaaaacccttaccattccggcttggctaaatactgctgcgcaggaagagggaattaatttttcaaaaacactgcaggaagcacttatgtcaaagcttaaggctcattagatatctgcattataattcggagacattatgaacaacgatataaaatacaagctggccaatgccatgaaggaatgcatggtttcctctcctgtcgagaaaattacggttaaggaaatctgcgatacatgtggtgtgaccagacaaaccttttacagaaattttcaggacaaatatgacctgataaactggtattttgataagatactgattgaatccttccaccagatgggtgagggcagtaccgtgtacgaaagccttgttaaaaaatttgaatatatcaggatggagcaccttttctttaaggctgcttttaaaaatgatgagcagaacaatctaaaggagcatgattttgagctgattcgtcagttttacattgaccagattgagggaaaaagccaccggaaaatatccgacaagctattgttccagcttgagatgtactgtcagggctctgtctttatgacaacacagtgggtgcttggcaataaaaacttcacccctcaggagcttgccggactgctcgctgatgctatgccaaaagagcttgccgacgtgtttcgcgaggtaaacctgatataattcaaggtaatattcagaaccatttagaacaagtatcgtgcgtttttacaaatgtgcacggtggtctgaatagttatatcagcgttaaaaatccgggaatgctgtcaattgacagttcccggatttttacatccctgtaagctgttgcagaattacataatcttacggaaaagagccttcaaatcctcaacacttgcatcctttggatttccaggtgcacatgcatccgcgtgagcagactctgcgaggaagtctaagtcatcctccttaatagcttcaagctttgttgggattcctacatctacagagagctgcgctacagcatcgattgcagcctttctgtactcctctacagacatatcatctacgccctttactcccattgcgcgggcgatttcacgatatttttcgcctgtacagtctgcattgtactccattacaattggaagcatcatagcacatgctactccgtgtggtgtatcataaacagctccgagtgtatgagccattgaatgagcaattccaagacctacatttgagaatcccattccggcaatgtactctccaagtgccatgccctcacgcccctctttttcattggcaactgcacttcttaaggatcttgcaataatctctattgctttgagatggaacatgtctgtcatctcccaggcagcctttgttgtgtagccctcgatagcatgtgtgagtgcgtccatacctgttgatgctgtaagtccctttggcattgatgacatcatgtccgggtctacgattgcgatgattggcatgtcatgtgggtccacacatacaaactttctctttctctctacatctgtgatgacatagttgattgtaacctctgctgctgttcctgctgttgtaggtactgcaatgataggaacacaaggcttctttgtaggtgcaaccccctctaagcttcttacatcctcaaactccgggtttgcgatgatgataccgattgcctttgatgtatccatagaagagccgcctccgattgcaatgaggtaatcagctcctgatttcttaaatgtctctacgccatgctttacgttgtcgattgttggatttggcttaatctctgagtaaagctcatattccaatccgttcttatcaaggatatctgttacctttgctgtaactccaaatttgattaagtcagggtcagagcataccagtgcttttttaaagccatgcgcctttgcctctgttgcaatctcctggattgcacctgatccgtgataagatgtctcgtttaacatgattctgttagccatagtgtaaaatctccttccaattttaaaaaatactcctaaaaaactctgccgataaattcttataacttatctgcctgactatattttaacaaagtattaaacgagatgtaagttacaaacctgccaatgtgtaacatacctgttgcaatatgtaacctgccagttacctatgtatatcccaccgactgccaatcacaccttatggctgtctgatataactttctttaactctcttgccgccgcactaatcggttgatgtatatcatataccatacatatatttctctgcggtatctcctcctccagagctatctctacaatctcgcgatttgctatcgcagcctctgccataggctttggcataaaggcaagaccaagctcacttttcacaagtggcagtatctgatctgtcgttgcggtctctgtatcaggcgcaaattcaagtccgtgtgacataaaaagcctgttaaaaaactgaaatgtcatggtctcccgccccagtccgataagcggataattatgcagctcctttaatgacagagtctggcttccgagtgcagtaaaggtggttccacccacaagaatctcctgaaacgaaccaagctttatcatcttaagaggggcctctacctcagccggtgtcgataccactgcaaaatcaatcatgccgttttttacggcatttatagcctgtggggtggagtgattatatatcttaagcctgatacccggatatgccatgtgaaaaggttttagcctgtcaagcagatatatgtttagagctgtctcactggctcctattgatacgcttccgtgtgacagtcctgtgctgtctgacagctcctcctccgcagcaagtatctgtgacatcgctgcagatacatgcgcatacagacgctcgccctccggtgtgagctgcacacctctgttatttctgataaaaagtatgctgtttatctgctgctccaaattgttcatggcgcgggttacatttggctggctgtttccaagtgccctcgcagcttttgtgaaattgcagtattttgcaacataataaaatatcttgtagtactcaaaatttatatccatatttaaagcctcctttttattatcgttttaccggtcattttttcgatgatacacagatactaatgatataataatatgatatttcaattatatcaattatactttttacttattataatcataattgtataatcataaatgctcaaaagagaaatattgattatatatataagaaaaggacgtgtttcaaatgagtgaaaagacaatgtttccaagagaagaccatacagaaatgctgtttcagaagatactaaacgatccatgggcgtgtgacaggcttatggaaaccttcaatgaaaatctggtttacaacgatgaatttgatgtatcacttccggcagaaaaatttgctaaagctctcttcaatgcatataccaaccgcgatctttccgcactgcttatgtgtctgtgcaacaacaccgtatttgatttgctgcgcaattcatatatcataccgtacaggttcaatgccgacggacatcaaaatccgataatcatgaccgatgaacacggaaatccgctgcccgagtataaacacatatctcacgacaagaactatatacattttcatgagatatacaatgatatgccagataaaaaggatatctactacgcacaggcttaccgctacagtcacacatatgattccgagcatatgactcccacgcagcaggtcattgtaaagcatgacggaatactcttgatacgagagcttcccgataccgtaaaactcaaggagactgaggctgaggcttactctgccgtatgggatctgatgatacagattgaaaaggagcttcctatggcatatgttttttacggtcaggactctcttgtggaaaatgacaagcggtatgatgaaattggtattttcctgcgaagctctcatttcctaaaaaatcttgaaaaacatgtacaaaaggccgaggcgataatttatggcagataacagctacacagatatcatggaaaaaaatcatatggaaatcccctggcatgattatgccagacaggatggaaatatactcatagataaggcaggactgattgaaaaagcctctgtaatcggacgtgtcggactcatcatgctctcctgcggcaccggagcctggcgtgtgagaacctccatgaaccggctctcaaaggagcttggtgtcacatgtacagtggatgtcggacttatgtcaatcgagtttaactgctttgacggaaatgactgtatatcacagtcactcagcatagcaaacacaggtgtaaacacatcaaagctctatcgcatggagcagtttgtcgacaattttcctaacgaggaagctcatctgaccggcgaagaaattcaccggcgacttgatgagattgaacagattcatgccatttactcccctgcaaggcttggacttgcagcagctatagcatgctgcgccttcacatttttgctcggaggaggccctattgaaatgatactggcatttgtagcagccggcatcggaaatctcatacgtacaaagcttataaaacatcattttactttgttcctaaatatagcggtatcaatttctgcttcatgcttcatatatgcggcatttttaaaaattgcagagatggctttcaatgtaccatcaattcacgaagccggatacatctgttctatgctctttatcatacccggatttccgtttatcacaagcggaatcgacctggcaaagctggatctacgctccggtcttgaacgccttgcctatgcaataataatagtcatggtagccacgatgtttgcatggattatggcactgcttctgcgactgcagcctatggactttgaagacttgaatctgacccccgtactacatctaatcctgaggcttataatgagcttcttcggtgtgtttggattctcaatcatgttcaacagtccagctcccatggctgcaacagccgcacttatcggtgccatagcaaattcactgcggcttgagctggtagacctgacaggtatgccggctcctgctgccgcatttgccggagctctcacagcagggcttctcgcatcatttatcaaggaaaacaacggatatccgagaatatcccttactgttccatccatagtcataatggttccgggactttatctgtatcgggctatatacaatttcggcataatggcactttcggatgctgtttcatggtttgcatcagcaatcatgattatcattgcactgccgctcggactcatctttgcaagaatactaactgataagacgtttaggtattgcacgtaacagaatcatacacattataagcagacttgttttataccattcaaatttcggacagcacaagctctgcaccaacatccaaatattaaactcaaaaaacaaggaggcattcatcatgcttacagcagttacaggaataaactggggagacgagggaaagggtcgtgtcatcgaccttctcgcagaacatgcggatatcgtagtccgctatcagggtggtaacaatgccggacacacagtagttaataaacagggaaaatttgtcttaaatctgcttccatccggaatacttcacccggatgtagtatgtgtgctcggtgacggaatggttattgacctaaaccatctgtccaatgaaattgcacagatcagaacacaagatgtatctgtttcaccaaaaaacctgaaattatcaacaagagccacaatttcaatgccgtggcataaaatacaggatgagcttgaggaagagcgcctttcaaagtccggagcagccttcggctctaccaaacgcggtattgcctatgcatacagcgataaataccgtaaaaaaacaatccgtctcggtgatttactccacttagacgaagagaatgtacaggccagacttaagaccatgcttgaagctaaaaaccttgagcttgcaggttgctatcatcaggagcctatgtctctgtcagctcttttgtcatggtgcaggcagaaggctgcaaaatatgcaccttatatcacagataccggtgcattccttgaggatgcactatcaaagggaaagcgtgttgtacttgaagcacagcttggtgcaatgagggatatagactatggtattttcccatatacttcaagctcctccaccatctcagcttacggtcctataggtgccggtatccccggtgcctcattagatcatgtggtcggtgtactaaaggcatactctacctgtgtcggagccggaccatttgtcgcagaaaaagctatgaacggtgaatggactgaaatggtccgcaagtatgggggcgaatatggtgctgccactggaagaccacgtcgtgtgggtccatttgatgccgttgcaagccgctatggtctaaaatgccagcatgccgacaaaatcgcactgaccaagctggatgtcctgagcatcatggatcagattcctgttatcacaggatatcagtataaaaatgctgtaacaaacgtctttgaccctaccgaaaatctggaaaaatataccccggtagtcaaaatgctgccggggtggaaaaccgatatatcaaattgcaggtcatatgatgagctgcctgtaaatgccaagcgctacataaacttccttgaggacatgctaagacacgaaatacaatttgtctcagtcggagctgagagaaatcaatatcttctcaatggtaagtggctgtaattgcctttaacatgctttaaccgacctctatgccattgccatattatttttctgatttactaagatattgtatacacgaatgtgctgccacatttccttctccgacagccttcgtatactggtatggcctgcctgtgcagtctcctgctgcaaaacagcctgccacatttgtctgctgggctctatccaccaatatatgtccgttttctatttcaagctgcggcataagctttgatggtgcgatggcgttcctgaggcagaatactccgtctacgctctcagtctttccgcttcgaagcgtaattccctccacaaatgagtctccgattaatgctataggtacatcctttgatatctttacatttggaagctctatttcgctgtcattataggctgggaaatacaatacctctgctgcaagatccgcaagatattttacctcatgctcatactttttgtcattgcatatgacagctatcctcttatccttgtaaaacatgccatcacaggtggcacagtagctgagcctctttccaagcagctcatcctccctgtccagctgctttgcagacatcacacccatgcaaagtatgagagtccttgcctcatacatctcattgtctgcaagcaccataaagccgtttcctgcaggcatgatattggtcacagtcttttctgttatatcaattcccgcagctctcctgtgagcgtcaaagcgttcaaacaggtcctgtccgcttatctgcggaaatccgggatagtttgtgattttctctgccttttgcaccttttcgcttaggttcttcgaaccaaaccagataaaatcctttttatatgtttttaaattcagggctgccgacagtccggcaggacctgttcctattattatactatcgtacatgctatgctccttgtaccaaatatttgtatatatttagaccttatatattataattaaaggggcaaaaggtattttgaccctcatttatgattaatcagattactacatgctacgcattcccgtaatctgactccacctcgaaatccgctaatttgctgcattccggcagcaaattgctactttctcggtgtagtgtgtgtcacatacagtgcgccttcaatgcttcgatatactcccttgcatatcgcgagagtaccacaccctttctgctgataatgcctatcctcatatactcctccacatcaagtggctttgatataatattccttccattgagctctgcggaaatcactcctgagcacactgtgtagccatttaagccaattatcagattaaaaagtgtagctctgtctctgaccctgatattctttctgctgtcaagagtgctgacaaattcctccgaaaaatactgtgaattgtactctccctgctcatacgtcaggtacggatagtcctgcagatcatccatcgtgatgctcttttttgaagcaagcgggtgactgtcacatatgaatacatgcggtgtggctgtaaaaagctctgtgaactcgagttcattacgctttagcatctttgaaagcacctccgtattcttggagcttagatatatgactcccagctcactctttaaattcgtgacatcctcaataatttcgtgagtctgctcctccctgatggtaaaatcatactgatatgcatcaaactctctgattacatccacaaatgcattcactgcaaaggaataatgctgacacgataccgcaaagtgcggcttactcaccacatcatccttgtagatcccctctatgagatctacctgctcgagcacctgtctggcatgaccgagaaatctctcaccatcttctgatagaatcacgcccttgtttgtcctgatgaaaataactatctgcatctctttttccaggtcatgtatagcgctggtcacagtgggttgcgagacaaaaagctgcttggcagcctctgttatattgccgcattctgccactgtcaccacgtattttaattgttgcagagtcatgttcattctcctccggttacatatcgaaatattattttacacattaaatgtcttacatcgcttaagtcatctcgaaactattactgtataccgataatctttctcagtatctcacccaacagctttccgagcataagcggaatgacaacaagcaccacataccacagcagcttgtcataccacaccctgccatcatttatcacacagataaagtgcatggcaacaactgccactgaaaatacagatgcaagaagctgcaaaaagctcgccacatgaagcttatttgttaccttgccaagcgtgaataaaagcatcgcaccaaagaacattgctatatcagcctcccatggtatcattttactatacgaaaacagcttaaacatatcacgatactccatatgcagctcaagaaacaaatccactgatgctatcatgagcaatactgctcctattgtcgaaaataccgctgccagatatacataattgtttccaatcctgtgctgtctgatcttatatttaagcataccctttttctgcacatactgtgtacgcagataagaatctgtcgcagaggcaatagccctgtcgcagtactcggttgctgtcctgtatactttagctccggcatcgttatttttaagagcaaaatccacaaggctctctcctgccctgttgttgccacgctccgtcgcagtaaccagataccctgcaccaagcttctgctccttgccatcaaaaaaggtggtgaccagataatgaccataatcggcaagtgcatccacatttccaagctccactgctttcttccaccaaaacactgcgcgcccgggatcccggtatgtgccctgacctctttcaaacatatttgcagccatattcatggcatctgcatcgccagtctctgccagtgacagaaattgacggaatgctccctccatatcattttgtctgtatgccatcatagccatatcaaacgctgtacttttcatattgttctccttgacagccttagctgttttcttcttattataatgtatttaacatgatgatagcaatacgacttctttcccaatttatagcaaaatgccgcacccgaaggtgcggcatctaagaggtttataaaatgtttagtttaaaagctgttttatttgcaagctcttttcttgcgatatgtagctgctgtgattgctaccattgcgagtccaagtaagcatacatatgtagctgcttcattgtcatcaccactctttggagctgcttttttgttatcaatagcagcctgatctgttatagaaataacgtaatcagatgcatgagtgaatttaagtaatgctgaaccatcatctgcaatctttacagacatctgaccctcaagagcctttgtctttgtattgtaatagtaaaggttagcatactttcctgcatatgtctttccaaggtcgattgaaagaaccggtttgaatccaaactcaccttcatgtgcgagactgatttgtactaccttctttgcatccttttcaatcttagctgccttaataacatcctcaggaatctttttgctgtcaactgtaactgacatatttacatcctttgcaggaacctttgacacgtcagaaccattgataacccacttgattccatctcccatatcaagaacaagcttcttctgtgttcccttaatggctgcaattgcatcctttgagacaactcctgtttcatccatcttaacaacgatagtatcctttgcagaagcattcttgattgtttctacttctttactccagtcaacctttgctgccggtgtcggatctgtcttgccaggatctgccggtgttggatctgtcttgcccggatcttctgttttcttcacctcagcaagaatgattgttccaccatcctttgctgccggaatgcttactgttactgtcttatcagaagaaacagtatatgttttaccatcataaagatttttaactgtatctcctgcatttgcattaaccggaacttttacttcttttgcggcatccttgatattcataccaacatataaggttgttcctccatatgttcttgaaactacatcatagccttcctcatcagaacttgccacaacatttctgcttcctcttgtgaatacatctgtgtatgcattacggatgctcagcagattcttataatgctgatatgtgacattgtcctttgttgccttagagaaatccatgtcatatctattagtctgatatggataattatttaatccacttaaaccaacttcttcaccataatagataaccggaataccctttgcagtaagctgtaaggtagctgcaactaacgctgctgatgttgccttatcctcggtatatttttttccgttcattaaggaagccttaaatccatcttcatcatgactgcttaagaactgacccgtcatgtatgcgttattaagtgctgaatttcttgcagaaaggaatttctctacagaagaaatattgccacttacaaagcttgttgcctgatcgttaaaatcgaaatcaaggtctgcatccatctgaccagtacctaaggaactaccatttgatgcatatcctgcaccaaagtattcaccaatcatcttgaatgatgaatttacttttgttgtagaatttttaagtgctgcccatgttgtgctgtcaacatgctttacagtatctacacggaaataatcaactccataatccttcatccatgatgtctgccattctactaattttgccctgacatctgcattctctgttgcaaaatccggtaaaccagactgccatgatttaatatctccttcactgacactcttatcccttagcatatcagcaaatgttgattctgtaccatatccggcatggtttacaacaatgtcaaccataatacgcataccacgcttgtgcgcttcgctaatcatagtctcaaattcttttgttgtaccaagtgtaggattcaattttgtaaaatcacttgcccaatatccatggtacgctgcattataagggacatcttttgaaccctcatctgttacatctacaccttttatattctctacaattggtgtaatccagatggtatttacacctaaatcctgtaagtaatctaacttagctgttacacctgcaaaatctccaccatgatacagtcccgggttttttccatatgtatctgcaccacttgctgtattgttagatttattaccatcaaagaaacgatctgtcatcataaagtaaacaacagcttcatcccagtcgaaatcttttttgttttccttcacacggtctgtaatttcaacatccactgtagtactgaatttattaccatactggtctgttacagtaattggtaatgtcttaattcctaatgttgtatctgttgttgcagaaatggtaactgcctgcaattccggttcaatcggcattgcattgcttccgccaatggaagaaacatcgatacttgcactagctacttctaatgttttagcatctgaactatcctgttcaaccttaaacttaacaacatcattctcgttgtagttaaaggatttattcataacttctgctgtaactgttgcatttaatttatagtattcaaaatatgagtaatcttcgttattatatttttcactatttgaattgaatgcatctacaacataagctccatttgctttgtaacgataatgtgttttgccatctgttaaaccgctctttacatactcaaaacgctttgttgcatcattgtatgtcattggatactctgttccgtttacgtcaacagctacagtcatattctttaaggtgccatctacaaatgctgcatcatcacgatagtaatatgatacctgctgtttttctgcatctacttcatagccaacattatatggcatagcaatttccggctcactgccggctttcatgctggcatagataaccttctggtcagaagggaatgtaactgaatggtctccaccatctttaatccatgggtcacctgttgaatctaatgcaatacaaaaatcaacctttgtacaagatggttttgctggaattgttactgtccatttatctccacctgcatatgtaaaattggttaatactgaagcatatcctgatgtccatgtatagaactgtggtgtaatatctttttcttttaatcccggattctcataatccaatacaaggtatctcttttccgtttgtttaattaccggtttctcatgaaccggatctgaaccatccacataatataatacctcattctcatcaccgcttattgtaaaagaacggtctgcggtatcagagccgccatcccatccctgtgttatgtcataacgtgcctttaatcctactgtttttcccacattactgccggcaactgtaatggtctttttaaaccatgtcacattatttgcagcatcatattctgtttcatcaaaaacatatgatccatttaatccggcattccacatccacatatcaacttttcccatgtctgtgtctgttgataaatcttcattgtaataatacattgtaaatgtatggtctggaaccggtgcctcccagctgtccggtgctgttttatatacggttgtatcaccaccactttgggttccggtaacccagagttcagtacttgttgatgttacagagacatcaatattatccgtctgtgtcccactgttattattaaaaatacagctgaaattctgttttacatcctgtgtatatactacatcataccatccggaatggtcagcattttctttaatctgtccgcccggccattttgaccattcttttccaacacctgctcctgttgcagaggcatctgctccccacatataattgtaaatagtgcttcccattcctgaagcaagataatgaatggttgttacatatttccaatcggcaggttttgtctctgacaaagaaccatcaaaccagtactctgcttctgcctttccttttgtggaaagtgttactttgtctaattcttttccctgtccatcattatttaaaatgagagtataatctgtactgttatctaatgtcagatgcattgtataccagccttcatgaccttctgttgcagtcatggtttgtccaggccatttacctgccggctcattggtctcatgatatatatatgctgcaacatcatcgcctaatgtgctcttataattaatcgtcagatcacattctgttggtacagacgctggaatcaatgtttccttctttgtagcatccttataccactgataatttccattgccatccaataaacaataaatgcttgcatcagaagtaaaagtcttaatctgctcaattgcagctccttctgtctttatctccggtgcagccttctcatcagaacctgcatcaacaaactgaaaacctgtccactcactgctctgtacatctacataatagaatccagaactttcctcatatgcaagctttggtttttcctgattactccattgtgtaatggtggcatttcctgcgccatggttatctaccgtagcaccgggagcccagacattgacaaccggtgtattccatgtacttggtttgtccaaatacaaccggattgtcgggctcgcagcatatgcagtggttgcaccaccgattgccggaaccatggtcacaatcatagcaagtgcaagtaccatactaaagatacggcttacaacgccatgtttcctgtgaaagcgttcttttaactttctcatatttcctctccttttcttattatgtttgtacgaaaattccctttcgcacgttttcgtatttatattatagtcttttcgttggttttcggctattaggataaacagagattttatttacgaacttttggtaaaatttactatttattcatttttatgtaacatatgcgaaatctttttagtactaaaggtcctagatataatagataatttttcatttgaaattttgtgaattatttttcaagtctatatgacatgatttaagggtcaaaaccaccttataaaaaatggttggtaccttgaaaatgtgaagttttcaaggtaccaatttatggtttacaagggattgatagcatagtaggcagaccttggggagctgtaatcactaaatcttttaaaacagctcccaaaattcagcccataagccggataatatgaggcttatggcataatggtggaagcctttagttatttcacaaaaaagagcctgcacatttctgtgcaagcttcttttgaaaactaaaaaccaaaaactaaaaatctaaaatcaaaaactaaaaaattatattgttattttattatatatttaatctttaaatcaactatccccagatgatttcttccttggcggcctccacattttcctcggaatgctccacttcctttgaaaagatccttgccacctccatctgatcctctatggtgaagctgccaccgtttttgtagaagcgtgtggcattcatatccctgactatcatggtaaacatgacgcttaaatatgcataaaccatgatatttgagtcatagatggcattcatgatatatctgaaggtaaagtatacaagaagctgctcaatatcgttttcacggtaatcgccgctagccatgtactccttcatgcgtttttcataatcagcctctgtgaggactgtctgcatatcatccttgaaatcctgccatacctggcgcaatagttccatctcattgatgataccgaatcggatatcgaaatgctcaaatgagaaatcattaaacgaaagccagtctatatgcttttcaacatcgttttggctcagcttcttctggtactcgtttgccctgtcaaggtactcatccacgcgtactccgattggctttgtcctatcctggagtatggcaatcagctcgcgctgcacctcctcaaaaaatgctgcctcttcctctgtgactccctggtcatcatcgctgtcgccaaaaagctcctgctctacaaacttaacaggctttgttttgctgaaaaatatacggcagacctcctcgcacgcaaggctcaggcacttctgctccacgtttctgtactctatgccaaaccttggaaaatcggtgcacacctcactaagcgatgcctcaccagctgctatgtacaaatcacacagattcttgtcatttagcataatgcagcgcccgcaattgtttgtacggatgccgtgcccgccatcctccgtctcatacatgccctttctcagacgttctccgacctctccgggcagtgtctgataatactcatatgaatcctcatcaatatcaatttcccagcccagacagcagctatccttgcattctccggctatacagctaaactctgaaaaataatcaggtacacggactatcatacttctctctccttcagtaaatcttcgtttgttgtatcactgtgcttatttctgaagcgcgcttctatagccgcccagtcagggtcttcatttcccttaaaaaagttgtagcctatgtatccgatgcaccacacaagccctgcaaatgtcgtagaaaatgctatctttatgatactcttaagcaagagtggaagtgtcagcatatcattgccaaatgctatgataatcacatgaataggcttaatcagcataagataacctcccacataaagcgccgctaaaattccaagcgcatagcacagtattcctaataatttgtcgcattttttcttcatttcaaatcctctaatcatattttcgtaaattccagtatggacacctctcctgttgctcttgtcttctccatgtctatcacacgctggtttgcagagcccttgaatttgagcgtgatatccttctgttcctctataaacggaccatctaccagaacatctatcatagataaaagctcatccgtatactctgtgtgcttgcgtccgttttctaacagttcttcgtacagatagcctgtgtaagcccacacatccttattgggatagctctccttaactcttctcataaacggcacaagtgcctcctgattctcctcctcaaaaggatcaccgcctaaaagggtaattccctgcacataggcaggcttaagcgagtcgagtatctcgttttgtatctgttcatcaaacggctctccatagtcaaattcccatgtctgcggctgaaaacagcccttacagtgatttctgcagcctgatacaaaaagcacagtgcggcagcccagtccgttcgctatgtcacaatattttattcctgcgtagttcatactttttcctcgtatctgagattatagttccatttaaaaattgcactgcctattattataacatatcctatcacacttagatagtccggtatctgttgtaaaaatacaaagcccagcagagcggcaaagataacctgcgaatagtcgaacaccgatatctcctttgcaggtgcctttgtgtatgcctttgtgattgaaagctgtccgcctgtagcggcagctcctgcaaaaagcagcatgacaatctgatatacactcataggctttgctccgacaagcagaaacggagccgtcactatacatgaaaataccgaaaagcacatgactatcacaggtcctctctctccctgcttaccgagctttcgcacaaatgtatacgctacacctgcgccaaaacctcctattacaccaatcatggcattaaaaaactgcacattcatagatggcttcaccacaaaaacagcacctataaacgccgttaccacgcacagccactctgtcttgtttgctttctccttaagcacaaaatatgacatgattatggcaaaaaacggtgacaatttgtttagaatattggcatctgcgatggccagatggtcaactgcatagaaattgcatataagccctgttgttccaaagaagcttcgcagaaaaagtcccttccagctatccttttttattttgaagccttcatcactttttgcaagtaagataacagccgctactgctgctaccgcgttcctgaaaaaggccttctgcatggtcggcaaatctcccgacatcctcacaaaaaatgtcatcagggcaaaaaagaatcctgccattatgatatatattattccttgtttcttatcgttcatacttatagtataacgtattctgtcaagaggggataaatcaaacgtctgccattttgctcgcaaaaaaggaccgcccggatgagcggtccttttaagatgaagggaaaatataaaagaaaatagttttagttaatggtctgtatcagcccttcacacttcccatggcaacaccacctacgatgtgctttgaaagaataaggtaaacaactattacaggaaggatagagaatgtaatcatcatatatacctttcccatatcaaactttaagaagtctgcacttctaagctgtgctaacaggattggaagtgtcttcttgttattttcgtgtaatataagtgccggagtgaagtaattgttccagctgcttacaaaggagaaaattgcctgtactgctattgccggcttcatcagcggaagcacgatatgattaaacgtcctaaactctccggagccgtcaattctcgctgcctcaatcagagacaatggaagcgagctctccatatactgcttcatgtaaaaatatgtgacaggtgcagcaatagtcggaactatgagtggaataaatgaatccatcagtcccatgcctgttaccaatttaacaaatccaagtgctgtaacctgtgtaggaatcatcataaccatcagtatgaatgtagagatgaatttcttggctttaaactcatatgcatgtatagcatatgctgtcatggtcgaaaaatatacacatagtactgcactgcaggctgctacaaaaaggctgttaaacatacctcttatgaccggaagtgtgtcatgtaagagtgagttccagttatcaagcagatgtgcacttggaattgcagtaaatcctgcctgaagctctccatttgacctggttgcattgattatcattacgtaaaaccagaacagacagaagaaagagattattacaagcacgatatatgctaaagcacgtctggcatgtattcccatacctttattttttttgtttacatttgctgccatatcgacctactcctttctcttatcatcgttgccgctgagcttgaataccgctatactaagtattgccgtgatgataaacagtatgactgacaatgcaccggacattccataatccttactgtacagacgtttgtttaagtacatgataagtgtcatgcttgatctgaccggattacctgttccgtttgtcaaaatctgtggtacatcaaagagctgtaagccaccgataagtgatgtaatgattacatatatcagtatcggtctaaggagcggaagtgttatcttaaagaacacctgtgtgcttgttgctccgtccacctctgctgcctcgaatagcgatgtatcgattccaagcatacctgccataagcaggatggttgtattaccaaaccacatcagacagttcatcaatgcgatgagtcctcttgtactgccaacatgtgacagaaacttgtacggctctgagatgaagcctatctgcataagcagattgtttataggtccaccatcagcaaacaatgtaaagaataacagcgaaaacgctgaagccataatcagatttggcagatatataactgttttaaaaaatcttgttcccttgagctttaagctgacatccgaaaaccatgctccaaggagcagcgataagaatatctgcggtatgaagcacatgatccaaagaaccattgtgttcttaaaatactgccagatatcaccggatgtgaacaatttttcatagttttcaaatccaacaaagtttggtcctatctgtgtaagacccgacatataattttcaaaaaaactgttgtaaatggtagtgattaacggtaccagctgaaatactacgtatacaacgataaacggaatcagaaagatatagccccatttgttatatctgaccgctttacctccactctttctcataatacctacctcccaactggtattgtagtcaatggttatgtaatgctgttaactgattttattgattttaaaaatattaccccgcctgcctgcttacgcaaggcagacagggtatttgttagtttatcttattagttctatgatcaattcaaaaactatcttattctgcgaggtcaggatatttctcaataactgccttcttgaaggtctcaatagctgtatccttatcgcagtttccttcgaagtaatccttcatagccttctggaactcctcgttgcagccctggtcatatgctgaaaggttgcttaagtcaagagtcttaacacctgctatatacattggtaatggattctgtccgccaagtactgtacttgtgtaaggcttgtcgtccttgcccatgattgttccgtctgcaagaccgtccataactgtgctgttgtttacgaaatcatcatccttaacaacgatatccttcatgatgtcatcgtctgttgtcatcttgagcatgatatcctttacaaggtcggcattgtctgttccctctgctgcacagatccatgtaccgccccagaagaagccctgtggtccctgggctgcaccccagccgccctggtttccgatagaacctgactcatctgctgccattgagaagtttactaaccatgcaggtccaaagtatgagaatacttttccttccggatagaagcccttcttccagtcatctgaccaaagatcagctgttcctgtctcgcctgcgtctacaagcttcttagaatcatcaacccacttcatgatgttgtcatcaatctggattttcttgtcatcgcttacccatttcttagaaacgttgttagagtatacacggtatgtatcgtttgctgtagatgtcatcttgtagcctgctgctttcatcttctcagctgtagcattgaaggtatcccagtcagctactgacttctgaacctcatccggatcatctgttccaagtacctcttttgctgctgctctgttatagaagagaacacccgggcagccctgccatgaaagaccctttaagttgccatctgagtcagtaacgacatcctgtgtgtacttgtactgcttagagatatcgctgtctgtgattcctaaatccttgattggcattgtgtaatcagaatctacatatttaggtgcgtagtcagcctctaccaggaagaggtcaatcttgtcatctgctgatgcatcagcctgcttcaaaagtgtctcatcaaggttgttctggtatgcattgttctcattaggtgtaatgttccagactacatcaatatctccgattttgccatgtgttgcatccaccttcttgtaatcaggatagtggtctgtgatacggctctggaattcatcattccagcaatagatattgagaatcttgccatcgtttgtcacttcagtttttgcatcgcctttcttgccagagcttcctgtgtcggatgtatctccgctgccacagcctgccagtaatgatgctgccattgttgcgcaaagtaatgcgcttacgagtttctttttcatagaaaaatcctccttctcgcttcaggtttaaacctgttagtaaatgttagtaaaaaagtagtaaaatatattaaattctgcctacggattccccctccagcaaaattccttcaacaacagctctctccacaagtgctgttttaggctttttaatgatgcttatcaacctgtccgctgcctccctgcctatcttgtcagtgtcctgtctgatagtggtgagcttcgggcttagcatctgtgaaactcttgtaccatcgtatcctgctattgatatatcctccggaatcctaagccctctgcttcttataacattgatgcctccgattgccgccgtgtcatccggatagatgatacatgtaggtttgtcaggtaaatcgagtaaatattctgtctgatttgcaacatcctctgtttccagataccttgcttccctgacatactcctcaggaatatctattccatgcttctcaagtgccctgtaatatgctgccagcctgtcacgtgtaacactcgaaaaatcctgtccatgtatgtaagcgattttcttatgtcccatgcttattatgtaatcaagcagctcgcccatacactttacattgttggaacttactgccgaacagctatagtgtacgtagtcaattgtgaccaccggtatgtcgctgctcatcagttcctgcacctcattgtcctgaaaccttgcacatacgattacgactccatcgaaatttctgtacttacagtgctccaggtatgataatttttttccgaccggacttgtattgataaatgtaatatcatatccaagcatctcagcctgtgccttgattccgtttagcactccggcaaaatactcatgcgtaagccccatcgccgcctcatcgaaatacagtactccgatgttgttcgactcgtttgtcttaagaactctggccgcagcattaggaagatatcccatttccttagctatcttctttattctgtttttggtctcagcgccaatatccttctggtcatgtaatgccttgcttactgtcgctgtcgaaacaccacatctttgtgctatgtctttcagtgataccatatcgtttcctcatttcgaattggtttcttaatcgttttcgtatcttcactataccacaattcattattattgcaacccctaatttacattttcaacatttttaacactttttattatcttttattatgcattttgtatagtgttatgttatgtatttaaaacgattacgcctttgatcttaattattatacaattataattacttaagtgatattatctcatcagcatttttaactataatatgcagttttctttgtatatatgtcataaaagcattattttttattgttttatgcttgatttttagatattcgcattatatacttctatatataaacagcttaaacgtttgcgtatatttaataaaaaaggagattttatatatgaaatttggacacttcgatgatcaaaacaaagagtacgtcatcacctctccaaggactccgttaccatggatcaactacctcggatgtgagaatttcttttctctggtatcaaatacctgcggtggctacagcttctataaggatgcaaagcttctgcgtctcaccagataccgctacaacaacgtgccatacgacagcaacggacactactactatataaaggatggcgacacaatctggaatccgggctggatgccttctaagaccgagcttgactcatacgaatgccgtcatggcatgggctattctgttttcacaggagtaaaaaacggcttaatggctcagcttaccgactttgttcctatgggctctacctgcgagatcaataagctcacattaaaaaacacatctgataagaaaaaagacttttcggttttctcatatgtagagttctgtctgtggaatgccatggatgacatgaccaacttccagcgtaacttctctaccggagaggttgagattcacgtcggtggctctcagctcttccacaagacagaatacagagaacgccgcaatcactatgctgtatatgctgtaaatgcctctgttgacggatttgacacagacagggattcattcttaggtgcctacggcgaaaacagcgcgccttccgttgtagtaaatgatcagtctaagaactctgttgcaagcggctgggctcctgtcggctctcatcacctgaaggtagctcttgagccgggcgaagaaaaaacatatatatttgtacttggatatgtagaaaaccctgtgaacgaaaaatgggttggacgcgctgaggatggaatcataaaccgagctcctgccgatgcactccttgcaagatttgacaccaccgaaaaagccgacgctgctttagcagagcttaaggcttactgggataagctgcttggtcactttagtatctcttcatcggaggaaaagcttgaccgcatggtaaatgtatggcatcagtatcagtgcatggttacctttaacatgagccgctctgcttcttattttgaatcaggcatcggacgaggcatgggctttagggattcctgtcaggatctgcttggcttcgtgcatctgattcctgacagagccagggagagaatactcgacatcgcagccacacagtttgaggacggctctgcttaccaccagtaccagcctctcaccaaaaagggcaatgccgacataggctcaggcttcaacgatgaccctctgtggcttatcgctgctgccgctgcttacatcaaggagacaggcgactactctattcttgacgagtcaacaccatatgacagcgatccttcaaaggcaactgactttatggagcatctgcgccgctccttcaactatacaatcaatcatctcggacctcatggtctgccacagattggacgtgctgactggaacgattgtctgaacttaaactgcttctccgaggagcctggtgagtccttccagacctttggaccatctgaaggacctaatgccgaatctgtttttatcgcaggcatgtttgtaaaatatggaaaagactatgtaaaaatctgcagacacaagggactttgcgacgaggctgatacagcccaaaaggctattgaacagatggaaaagaccgtcatggatgccggctgggatggcgagtggtatcttcgtgcttacgaccactataagcacaagattggttccaaggaatgtgaggatggaaaaatctttattgagccacagggcttttgtgttatcgctgaaatcggaaaggatgaagggttctgccttaaggcaatgcagtctgttgaaaaatatcttgatactaaatatggcatcgtgctcttgcagccgccttaccacagatatcatgtggagcttggtgaaatctcttcttatccaccgggatacaaggagaatgccggcatcttctgccacaacaatccttggatttctatagctgagactgttatcggccgtggaaacagagcatggcaggtatacacacgaacctgtcctgcatacattgaggatatcagcgaaattcaccgcaccgagccttatgtatacagccagatgattgccggtaaagacgctcctaactttggtgaagcaaagaacagctggctgacaggtactgctgcatggaccttcctcgatgtctcacagtacatcctcggtatacgtcctgactacgatggtcttatcatagatccttgtattcctgacactatggacggctttacagctaagcgtaagttccgtggcaatacttaccacattacggtcagaaatcctgcccacgtacaaaagggtgtgacaaagctcatcgtggatggcgctactattgatggcaatatgattccggctattaacggaaccggacacgatgttacagtcgaggttacaatgggttagagataccagacggcctctgtactgcttcaaatatgacccagaatacgaaaatgccgccgcagagcaagctctacggcggcatttagactgctggtgatgttcttaccatgtctttatttcttctctaaaggatgctgttatgtaattgagacctgccacatatgctcctcggtctctcccatgtgaaacagctccacagtctgttcatcatgagtatcatcaggctcatagttgccaagaagatgtatgagatacttctcctgctcatctgatgtagagaccttatcaatgtatttttgcaattcctcaagaagctgctttggctccatgtcggcatcgactgcgattccaaagcacttcttcgcaagacctgcggtataatacagctcgtagttacttacaagcactgatttttggcgtaagcatttgagtatgatgctttgtctggctattgatgtaatcatattatttcctttccgagttagctggaatacctctaagtccaagttatttccattataccctatttgctttttgtttcaagagtataacatgatatagctaaagataacttaagagagtcctatgaagtggcaacaaatcccgtcaggaaataataaagtgctcccagtgcctttccaatagccatagaaatcactataatcccaagaccggcgcgaagcttcatgcgcttatatataatagggaatgtgtgcagtatttctgcgagtgcaactgcaatacagccgacaaatatgccgacacacaatccatatattgcaataattatattcccacagatattgcttacaggtactttgggcatatttgcaaagcccagattatatgccgtatcaagcactgacgatatattacctgccaccacaccacatatcatgacattttctataagtattatattttctatcctgctgcaccgaagtatacgcggcaccactcctatcacgagcacgaatgcaaatacaccggctgacactcctgcccctgctaaaaacgctatgactgacaaaaatatttcacgcaatatatattcaaacatcctgcttttcctttaccttgtctattattgtgttccacgtatccttattatgcttatccatctccacctgaatcggtgtgacatcgtcggatagcttacgctttccgatatgattaaaaaacagtatgattccgaccgccagaccaatgcagtaaaacacctcaagcaccgacacctgtggcttgtccacacccattatctgcttatagaaatgttcaaacacacctgatatcgaaatatcattattaaaagccatgattgtaaaagctgaaccaaaaaatataagtatacacaccgctgcaacctttagtgcttcaagaatcttatttttgctgttgtcgtcatactctacaagtacctccggctcaccaatgcttataacctgtgcatcatcatagatttccgtgatttgctctattattttcattacagatatcacgctctttttaccgcgtatcttatccacgatcattccctttatctgtccctcatagcgtgaatatttacaatacacacttgctatgtcattgatgcagacctgcctgcggtgaagtgttttctgcttttctgcgcgtatatacacgagaattttttcttttggggtatcagtatgctccggcatcttcatgctcccttcgattaatattcatatgtatataatttccatttattttgattttatacacaaaatacacacatgtaattaaatcaatatttttcgtgcgatatattgtttttttcgtgcaaacatcataaaataaatataattaatctaaagagtgaggtaacaaatggcatacactaaggaaatactgactctcgccgtggaaattggcgactgtatgctcagaaacggtgcagaaatctacagagtggaagacactgtggttcatatactaagttcatatgaggtggaggaatttgacgtatatgtgctgtcaaacggaatatttgcaagtgcaaatgagaacaaggaggatgcctgcagcatcgtgcgccacgtcccccttggtgctgtcaatctggcaaagatcagcgcgttaaaccagctcgcaagggacatatgtgaccagaaaatctccctgattgactcatgggacaggcttgagcagtgcaaaaatattcctaattacaaaaaaagcgcacagattttcttctgtgggctcggaagtgcctgcttttgctatctttttggtggaaactggcttgactttgtttttgcatttgttataggctcactggagcaggtgcttttgtttggtcttaaaaaatataagttcacaaggattataaccaatatccttgccagtctttttgtgacactgcttgccaccgcaagtacacttacagggctttctcttttacctgataaaatcattataggcgctatcatgccacttgttccgggaatagcatttacaacatctatcagggatatatataacggggattatctgtccggtacaatacatctgctcgatgcactgattacagccgtgtgtgttgctgtgggagcatgtctgccatttgttgtgatgaaatatattggagggatttaagctatggagtttataatacaatttattgtggctctctttgccacattatcgtttgcagttattttttccgctccaaaaaaggagctgttttactgcggttttacaggagcgcttggctggatcatctactatataatggttcagtttgatatgggtgttgtgtttccatcgcttatcgcgacactgtgccttacgataatggcgcgcatttttgctgcggcacgctctatgcctgtgacagtttatctgctttccggtatctttcctcttgtgcccggagcaggaattttttacacggcatattatctttttacgaatgacagggcactttcctcctcaaagggtattgaaacctttgaggtggcgggtgccatcgtgctcggtatcatattcgggtttggcataccgcagagtttgtttaatctgttgaagcctaagaaaaaatgaattacttgaactatgtcaaatttgcaattttctgcgccagatcctcgagatactcccaacgctccattttctccatcagctgtccctcgaggtcttccttttcctttgtgagttcgtttaacttaccaaagttagtggcattctttaccatctcatcatctatctcagaaagcctgttttccagcttttctatgtcagcctctatcgtctcgtactctttttgctctttgtaggtaaatttgagctttttctcatgcccccaggtttccatggatttcttcttccgggcttcttttgagtctgtaccatctgatgcagtatttccctgtgctcctgaagcggatgctcctgtggatgatgcattttccgatacggtttttcctgatgcaggctgtggacgtttattcatatagtcggtgtatccgccctcatactgtacgatttttccggctccctcaaatgcaaaaatacgctttgcaatcctgtcaaggaaatacctgtcatgggataccgtgatgactattccgtcatagccatccagataatcctctaaaatagccagtgtctcgacatccaggtcattggtcggctcgtcaagtatcaatacattcggtgcgctcatcagcacacgaagcagatagagtcttctcttctctccccccgagagcttgcctaccgggctgtactgctgctccggtgggaataaaaacctctcaagcatggcagatgctgacacaagtccgtctgccgtgcgcacaaactctgcagcttctttcacgtagtctatcactcgaagctcaggatctatatccacttcctgaccgaaatatcctatctttatcgtctgtcctatctctacctcacctgaatcaggctcgataaaaccggcaattattttcataagggtggactttccacagccgtttttgcctacaaaaccgatacggtcatttttcaggaaaatatacgtgaaatcctttacacagacgatatctccgtacgcctttgaaatatcatgaagctctatggttgtccttcccatacgcgatgaaaccgatgaaagctcaacccttgcgtctgtctgtggtcctttctgatcgcgtaaagcctcatatctttggatgtgtgccttctgctttgtggaacgagctcttgcgccgcgctgcatccactctatttcttttctaaggatggactgacgcttgcgctcacttgccctctcgctctcctccctggctgccttaagctcaagaaagcccgagtagtttgtatcatagctgtaggtctgtcccttgtccacctccacgattctgttgcagacactgtcgaggaaatagcggtcatgtgtgatcatgatgattgcacccctgaaacggcgcagataatcctcaagccactccaccatctcgtagtctaagtggttggtcggctcgtccaatatgagcacatcacacggcttaagtacgactgttgcaagcgcaagcctctttctctgtcctcctgagagctcaccggtcttttgcgtcatatctgtaatatcaagcttcataagaagtgactttgcatcactttctatgctccagcgcatgtcctcatccagctgcgaggtaaccacacggctcatcacatgctcaagagctgtctcgtccgggtcaaactccggattctgcggcagatagtttatcactatatgattcgctgtagtgacagttccctcatccggctcttcatcaccagccacaatctttaaaagtgtagactttcctgtaccatttatacctatgataccgattttttcgttttcctgcacataaaaggaagctttagaaaaaagcttccttccagtatatgactttgttatattttcgacattaatgatgttcatcttctcgtattttctcctccctctcatgctcctgcttctccttggcctcaaggattgcctcattgagcgaaagcatctttgcatcaagctgtcctacgatacctgcacactcgcgcagatcgcggctgatatactcaggtgcattgccctcgaacttgtaatatatcttgtgctcaaggcttgcccagaaatccatagctattgtacgaatctgtatctcaacctttgtgtcaaccaccttgtttgaaagaaaaataggcaccgaaacaatcatgtggtagctcttgtagccgctcgccttcggatgcttcatatagtcctttaccgatatgacggtcaaatcattctgcctgccaatcatctcagcaagccggtatatatcagatgtgaacgaacacacgattctgatgcccgctatgtcttttacatatgtgaccatattctctatagtactctcgtagccaccctttttgagcttcttaactatgctttcaggagtcttgatacgtgactttatgtactctatcggattgtaattatgtatgtgaacaaactcgtcatttaatatctcgagcttagtattgacctctttcagtgcagaattgtatagaaacatcatagtctcccagctatcaatgccctccgcaaactcttgttccatcaaaaacctccctgtgatctattcgcctgtatatttatcagactcttctaatcaattatagcatatttattcgcgtaattggcaaattatacctattatttatatattttttattcttgttattttatatgggttattttatatgttgtttattttatatgtgcacaggtccgcacactgcaggcacagagcggcacacaagtactctctcgtaagcgcatagcgaagctatttagaatctgttgaattatgcttcacaaccagaaatgcaccggcatggacgccggggcaaggcgttatgcgccatggacggcgcataaaagccggtttcgtcaagcatagaaaaccaaaaggcataattcctacagattcttaatggcgtagcgtagcgaacgagagagtacgtgtgtgccgctgtgcctgcagtgtgcggaccgtcattatatcaataataactcatcatatccataatgaggtatcaatcctcctcgatgacgtgcatctcgagaaaatcaaagtcgatatcctccacaaaattatccttcgtaaagcgtgtctttccatgcctcttgaaatcacttacgttgctgtcaagccagatgggctttcccaggtcaaaagcaaggcaggcatcctcaagtgccttaaaaatcttgtgtgtacgtgtgtcatcactgtcattttctattgtaatatcacgcatcaggtgcgtgtcagtataaatcttaaaccaaatacgcatattattctcccaaaagtcttctctgacgattgcactcatacatgagcaaagtggctgatattgcggcattaagcgactccacagccccctccatagggatgcggatatatgtgtccgccatgtcagctatctcatctgataatccattgccctcatttcctatcataaagccacaggctccggtgtagtccggtctgtcataagagcacttaccctttagatgagctgcgtagagagaaactccctttgactttgcatactctatagtctccggaaggtcatctgtgatgtaaaacggcacacggtagagtgagcccatggttgagcgcacagtctttggattaaaaatgtccactgttgtgcgattcattataataccgcttacacctgcgccctcaccggtacggatcatagtgcctaagtttcccggatcctgtatactctcaagcacaagaagctctgtcttgtcgcccttaaaaagttcatctatctcatagtgcggcatctttactatagcaagcacaccctgcggagtctgcgtgtcagacatgctcttaaacaccgagtcactcactatttctgttttgtcaagggaacgcttcttctcttccttaaacctgtcatcattaaaaaatgactcagacatatatacggcacttacccagtcatatggcgcctcaaagctcatctttggaccctcaaccacgaatacgccctgctttttccgctcctttgccttgcttaaaagagcctgcacattttttatgcttttgtttgatgcacttgtaatcattttctcctctttctatattgatgatatgagggtcaaaaagtattttgcccctcatttatgattaacattcgtctttctccgaatgcataaatgcccctgcaccggcacatgcacgcaattacctgcatttaatgtgccggatacaagggcattcatatttatcgtaactatattagatactaaaccagagatttagagatatcgtacatgtactcgtctacactcttcttcatagcaagtgcctcgtcgatatcgaaatctacgaaattgccatccttgtgggcaataactctgtttgacttgccctcgcagagtaaatcaactgccatagcgcccatgattgtagcgtatacacggtccttgcatgaagggcttccacctctttgcatatgtccaaggatagttgctcgagtctcgatgcctgtagcagcctcgatttccttagccatctcctgtgaatgtcctacgccctcagcattgatgatgatgtaatgctgcttgccgagctctcttgcgtgagctactctctcgatgagtgcctcaaggttgttgtcatacttctcaggaagtaatacttcctcagcgccgtttgcaagaccacaccataatgcaatgtatcctgctccacgtcccataacctcaattattgaacatctctcgtgtgatgtagatgtatcacgtaccttgtcaatagcctccatagctgtgttgcaggctgtatcaaaaccgattgtgtaatctgtacatgcgatatcaaggtcgattgttcccggaagaccgattgtattgatgccaagtgctgcaagtttctgcgcaccctggaaagatccgtcaccaccgataactacgatagcatcgataccatgcttcttacagatttcagcacccttctgctgtccctctgctgtaacgaactccttacatctggctgtctgtaagattgtaccaccgcgtgagattgtgtctgaaacgctctttgaatccatatccacgatttcttcatttaacagacctgcgtatcctctcttgattcctttaaccttcttgccctttgagagagcctgacgaacaacggcacgaattgctgcgttcattcccggtgcgtcaccaccacttgtaagtacacctattgtgttaatctcttttgccattggtataacctccatatgttaaaaaattatcatttattctaatcccaatctattgtacttgttttagcacattttttcaatattcttttcaacaattttcgcattttctttgtctaaaaattccaaaagctgctccatgagctcattatttgcatttacggaataatttctgccaagttttttcatctgctttgtatctgcgatgtaaattatgacttcatctcctccgtcagattcacggattgtctcaagaagcctgctctcatttttcttatagtcctccattgtatcaaacctgagccatagctgcttcggaagctcatcaaacggtatgattttctcgcagattatcttgccgttctgctcatcctcgactgtcgcatgtccgataacaaatattttagcatcgtcctgtaaatatctctggtagcgctcgtaatctctcggaaaaataattacctcaacagttcctgtcaggtcctctatcgtgataaaagccatggcctgattgtacttggtaaacttaatcgtctttgtagctatcatgcctccgattaccacatgcgcattgtcctctatctttacggcaccgctctcctcttcaagcacaaaatctatcgcatttgctgtgatgtttttctttagggtagctgcatatttttccagagggtgtccgcttaaatagatgccaagcacctctttttcataggccagggcttcctcagcgtcatattcaccaacatttggatacttaagctcaaatgactgcctatcctcatctgagaccaggtcaaacaggctcatctgccctgccattgttgactttttgtcatgctgcaccctgtccacaatcgatgcatacaccattgccatctgctttctcgtgccgtcgagtgaatcgcaggctcccgcctttatcagattctcaatcgcacgcttgttgataagctccttctggcaggttctctcaataaaatctgagagtgtgcggtatctgccaccactttcccgctcctcgattatctggtctattaccggcctgcccagagatttgatggcgtacatgccatatctgacatggtcaccctctgcggtaaactcgccctgtccacagttgatatccggcggaagcaccttaatacccatatcacgacagctgtaaagatactgcgccgccttggctgaattgtctataacggaagtcatgagcgctgccataaattcgaccggatagtagtttttgagccatgcagtctgaacactgatcttcgcatacgcggctgcatgtgatttgttgaacgcatacttagcaaaatcaaccatcgaatcgtatatgctgttggcagccttttcatctatgccgtttgccacacagccctttataccgcgctccttgtctccgtacacaaagctctggcgctctgcgtcaatgacatactgcttcttcttgctcatggcacggcggatgttgtccgcctgacccattgtatagcctgcgagcttctgcactatctgcatgacctgctcctggtatactatacagccgtaggtcggctctaaaatactctcaagctcaggtgtcacatagcttatctcctttggattgttcttgccctttatatagttgggaatgaaatccataggacccggacggtaaagcgaaataccggccacgatgtcctcaaagctctgtggactgagttccttcatgaagctttgcataccggcagactccagctggaataccccttccgtctttcctgttccgataaagtcaagtgtgcccttatcgttgaaatcaatatggtcaatatccacatcaatgccccttgatgccttgatattcttcacagaatcctttagcaccgtgagtgtacgaagccccagaaaatccatctttaaaaggccaagctcctcgagctgtaccatgttgtactctgcggtagggcttccgtcgtttgcccttccaagaggcacataatcactcgccacacccggatagattaccacacctgctgcatgcacggacgtgtggtttggcagtccctcaagcctttttgccatatctatcatttcatgcactctcgcatcactgtcgtaaatgcccttaaactccgggttcatctgaagagccttgtcaatcgtgatattaagctcctgaggcaccatctttgcaagcctgtcagtctctgcatatgggaaatccagcgcctttccgactgattttatgacacctcttgctgccatcgtaccaaaggtgactatctgtgttacagaatcgtgtccgtacttctgctgaacatactctatggcgcgatatctctccgcatactcgaaatccacatcaatatcaggcatggaaactcgctcagggttaagaaatctttcaaaaagcagattgtatttaaccggatcaatatccgtgattccggtacaatagcacaccctgcttcccgccgctgagcctcgtcccgggcctacccagcagtcgtgcgtgcggcaccagttgatataatcccacacgataaggatatactctataaagcccatggtctttatgataccaagctcatagtccatatctgcatgtatctttttaagctcatcagcactgtactcgccacagcctatgtatttctccctaaagcccttctcgcaaagctctgtaaggaaggcttcggcactatcatagccctctggcacctcatactttggaatcttgtaattgccaaactcaagtgtcacattgcatctgtcggcaattttctgcgtattctcaatagcctctatggcatatgggaaaagcgctctcatctgctcttcgctctttacgaaaaactgtccgccatcatagcgcatcctgtcctcgtcagacacctttttcccggtctggatgcacaaaagcacatcatgtgcctccgcatcggactcgtaggtgtagtgcacatcattagtacacactaaccctatttcaagctccttgctcatcctaagaagctgctgattcacaagcttctggtcatcaatgccatggtcctgcagctcaaggaagaagttgtcttttccaaagcagtcctgatacttccttgctatctccttcgcctcgtcataaaagcctcttacgatgtatctggggatttctcctgccagacaggcagacaggcatataagcccctcgtgatatctctcaagcgtctcaaaatccactctcggcctgtaataatagccctctgtgaaccctattgacactatcttcatgagattagcatagcctgtattattttcagctagcagaatcagatgataatacctgtcatcaccgtggcttgtctccctgtcaaagcgcgaatttggtgccacatatacctcgcagcctatgaccggattgatatcatttgcctttgccgtcttgtaaaactccaccacaccgtacatattgccatggtctgtgattgcggcagagttcatgccaagctccttgacgcgctttacatattcttttatcttgtttgacccatcgagcagactgtactcggtatgggtgtgaagatgacaaaatgacatttggattcctctttctttatttttgtatcgcccccgcccttcatggggtgtgcggctatctcctcaaaataaaaggagacaagtttatcagcttcccagctctatgtgtataaacaccgcaagcgaattgggctcctgcatatatgtgatagtgccgcctcttgctgtcggaatcagatatttgtagtcacccttatcgaaaagactgtgacatgcagtatcataggtttctctgtccgaaaacttgaacgtgatatagttagatgacgttgtcatgccctgtaagactttaaggtcgtaggatgtaaaatacagcccattcctgtaataatagtcatcctccacattcgcttcctgcggcagcatatcctcattgtccaatgtacgtgtaagctttaccacatcaagcggcactccgaaccagctgtatgatatgccctttcccagataatcaccatcaccgtaggtacagtccactgcacaccacgcaccgtccagatataccatattccaggcgtggtttgcatcagatgtggtgcctgtcacaataagtgagctgataccggcccggtcacacagatacttaaacatcatcgcatagccctgacagaccgtcctaccaagcactgctgagtacatatcctggttgtgaggagaattttcctcatactcggcatgctctatcacatattcatagaaatgcacagccttgtcataatccgatgcaccttcatcgatacctgccatacaggctgacacatagcctgaaatcgtacttattgcgttgtcgatatcagactcagacatattgtatacaggcgaaaaaatgatgctgtttctcacagtatactgactcttttctatgtagaaaaactgtggattgtccagcagcacaaactgctgtatacggcttacgttgtcagtgtctgtagtatttaacgaaattccatccatgcgcttttgcatcatcgcataaatctgcctgtaaataagcttgtcatcatctgacagcttctcgtagtagtagtgatattcccctgtaaatactgactcatcgtactctgtctgttcgccgtttaaatagtctgttgtggtctgcatttgcccctttactgccctgtgtatagctgtaggaaaatcagctatagcacctataaaccctcctgcctttaagcattttgcagcgaacataaagcaacaggcagcaaacacaagtgccggtatgatttttaaaagctttttcatctattcccccattttaatcgttgtctgtcactcttttaggtgtgaacagcagccatagcaagcctgcatatcaggtacagtacaaaaagatgcaccgggtaaaaggcgtaaaagacatattttagtgaaatgcctctttttccattgtaatagcgaagcggtataagcataaaaagtgcaaaaaactctatggtacctgagaaaagtccaagcagtatgactgccacggcaaatgcaacatcccggtttgaagaaagcaggtacatcatgacaatgcaccctacacccgccgcaccataatcacagcaaagcacaaactctgcaataatcatcataacaagcaccactgataccattactatacacctgatcagtgtgacaaaaaaccacttgactgcagaggatgccttttctattttatcgaccgacttaagccaatcaagcactgtgatggcaagcaggcctaaaagtaatgtaaaaaacacattgttgctcttaaattcgagcactgtattgtttattgcaaggtcaaacggtatctcagagataagcgcgaatataaacatcctcgcagcatatttttccctgctgtgtgtatatttgaacccctccacaagcaggaaacagaaaacaggaaaggccatgcgccctatagaacgcatgacccagtagatatcaataagcgtttgtccacctatcccgttatttatcatctgaagaataaccgttgccgcaatatggtctatgagcatggtaaaaatggctataagcttaagtgtgcttccactgataccagactttacgataactttttccaaaatcctatactcctgccatatttacggtaatcctgtcaagatgccagatatcgtccacatattcctggattgttctgtctgaagagaactttcctacatgtgcgatattgagcagtgcactctttctccatgcgctcttgttcttgtaataatcattaatcttctgctgtgcatttgcatatgagcggaagtctgcgaggataaagtagcggtcagccacctgtccctgctgtggattgagcagtgagttgtaaagctccctgaaaagctcatggtcatttggtgagtatgtgccgtctacgagctggtttactacctttcttagctcggcatcgttattatatacatcaacaggattgtagtcatgtctgttctcgtgtgagatgacctcatcagagctcattccaaagataaacatgttgtcagcccctacctcatctaacatctcgacattggcaccatccatagttccgatagtgagcgctccattgagcataaacttcatgtttcctgttccggatgcctccttgctcgctgtagaaatctgctcgctgacatctgctgccgcaaaaataatctcggcattggataccttgtaatcctcgataaatactaccttgagcttgcctccaatagaagcatcgttatttatcacatcagccacactgttgatgagctttattgttttctttgcatttctgtagcctgctgctgcctttgctccaaaaatgaatgttctaggatagaaatccatagacggattttccttaatcttgttgtacagatacatcacatgaaggatgttcatgagctgtctcttgtactcgtgaagtctcttaacctgcacatcaaagatagaatccggatttacatcaataccattgtgctccttgatatactttgctaaacgcaccttatttgctctcttaatctcagcaaactcctgctgtgcaacagggctgtccgcataagccttgagctttgaaagcattgtaagatctgtaatccagccggctcctaccttttttgttgcccagtctgcaaggagtggatttgcatgtgctaagaatctacgctgtgtgattccgtttgtcttgttattgaacttctcagggaacatctcatagaaatcatgaagctcctgattcttaagtatctctgtgtgaagctttgcaacaccgtttacagaatagcctgcaacgatagccatatttgccatcttgacctgtccgtcatagaggatagccatctttcttaccttgtcctcattgccaggatatctctcattaatctgcatcacaaatcttctgtttatctcgtcaacaatctggtatacacgaggaagcagtctctggaatatctcaattggccacttctcaagcgcctcagccatgattgtatggttagtgtaggctacacatcttgtagtgatatcccatgcatcatcccatgacagatgttcctcgtccacaaggattctcataagctctgcgactgcaactgtagggtgagtatcgttcatctggaaaacgaccttattcggaagatcttttaaatcgctgtgatgctttttaaaccttgcaagtgcacgctggatgcttgctgatacaaagaaatactgctgctttaagcgaagctccttgccctttacatggttatcgtttggatagagcacctcaacaaggtttcttgcaagattttcctgctccactgccttgtcgtagtcaccctggtcaaaggactcgagcgagaagccgttttttggctctgcatcccatatcatgagagaattgaccacattgttgtcataaccgactataggcatatcataaggcactgcaagcaccgactgatagtccttctgctcgaaatgaagctctccgttttcatctgtgctctcctgcacatatcctccaaacttgacctcatagcagtactccggacgacgaagctcgaatggatatccgtccttgagccagttgtcaggcacctcaatctggaagccgtctgaaatctgctgcttgaacataccatatctgtatctgattccacagccgtatgcaggatatccaagtgtggcaagtgaatccatgaaacacgctgccagtcttccgagtccaccgtttccaagtgccggatcaggctcctggtcctcaatagcattgatatccacaccaatctcattgagagcctccttgacctccttgtatgctgagaggtttataaggttgttgccgagagctcttcccatcaaaaactccatggacatatagtaaacaacctttggatcgtccttgtccatcactctctgtgtggcaatccactcatccatgatgacatcctttacggcctctgatacagcctgataaagttcctgctgtgtggcatcatctatagtcttacgatatttattttttaaattgtctgatacagtcttaataaacacctttttgctaaacgtattatctctcattttattcctccttatggcactaaaagggagcaaattaatgctccctctcgtgcagagattattgtttttcaactgcaagcttaacagcctcaccattaatcttccaatccttttcataacccttaagttcgcctgatttaattgatacggcaagaacctcggtcttgatttcatcaccaaacttttcaaatacatttgaaagcttctcatctgcctcgtatgtcacagcgatgtggtccataacctcaaagcctgcgtccttacgcattgtctggatcttactgatgatttctcttacgaaaccttcctcgataagctcaggagtgaggttggtgtcaagaacaacggttatattgttgtcagactgtgtcacatagccctccatctgagtcatctcgataagtaaatcctctttagataatacaacttcatcgctaatgctgtcaagcttgagagagccggtgctgttaagctcctccatggccttatgaccatcaagctcagctaaaactgccttaatctggccaaggaatttaccatacttaggacccactgttctaagctgtggcttgaatttgtatgtggtgtagtgtgatacatcatcagtgaactcaacctcttttacgttgagctcgtctgcgatgatatccacataaaattcatccagtttttccggagcctttacaaacatttttccgattggctgacggtttttgatatttgcctcgttacgacatgcacgtccgagtactacaacctttagtacctcatccatatcagcttcgagctttttgtcaatcagcttctcatcaactacaggatagtcgcacagatgaattgactccggtgcgctcttgtcaatagagcagacaagatttctgtagatatcctctgtcatgaaaggaatcataggtgctgccgcctttgatatggtgacaagtgctgtataaagtgtcatgtatgcgtttatcttgtcctgctccattccctttgcccagaaacgctcacgactgcggcgtacataccagttacttaagtcgtctacgaactcctgaaggtactttgccgcctccggaatcttgtagtttgacaggcactcatccacgcctgccactgctgagttgagctttgaaagaatccacttgtccattactgcaagcttatcatactcaaggctgtattttgtagcatcaaaattgtcgatatttgcataaagcacgaagaatgcgtatgtgttccagagtgttcccataaacttacgctgtccctcaagcacgagctttcctgaaaacttctttggaatccatggagctgatgctgtgtagaaataccatctgatggcatctgcaccgtatgtctcaagtgcatcaaacggatctacagcgttgccctttgacttggacatcttctgtccgttctcatcctgtacgtgtccaagcacgattacattctcataaggggccttgttgaaaaggagtgtagactcagccatgagtgaatggaaccatccacgtgtctggtcaactgcctctgagataaacttggccgggaactgcttctcaaatacttccttgttctcgaatggatagtggtgctgtgcaaatggcatggctcctgaatcaaaccagcagtcaagtacctctggtacacggtgcatatccttgccacactcaggacacttgattgtcacagcgtcgatgtatggtctgtgaagctctacctctgctgcctttggatctcctgctttttcggcgagctctgcacggcttccgatacactctctgtgtccgcattcacactcccagatattgagtggtgtgccccagtaacggttacgtgagatagcccaatcctgtatattctcaagccagtttccgaaacgtcctgaaccgatagactcaggaatccagtttactgtattgttgtttctgataagatcatcctttactgctgtctccttgatgtaccatgactctcttgcatagtagataagaggcttgtcacatctccagcagtgtggatactcatgctcaaatttcggagcatcgaaaagctgctttctgccgcttaagtcctttaatacctcaggatctgcatcctttacccacataccggcaaacggagtctcggctgtaagctctcccttgtcgtttacaaactgtacaaatggaaggtcataatttcttccgacattggcatcatcctcaccaaatgcaggagcgatatgaacaattcctgtaccgtctgacatagtaacatatgtgtcacatgtcacgaaaaagcccttcttgccctgcttatcggcaacctgcttagcgcagtcataaagcggctcatactccttgtactcaagatcctttcctttgtatgtctcaagcacctcatatgccttcttgcctgcttcggcatcctcttttgaaagaagctgtgagagcaccttgtctgcaagtgcctctgccatataatatgtgtagccatcaacagcctttacctttacatatgtgtcattagggttcacacagagtgccacgttgcttggaagtgtccatggagttgtggtccatgcgaggaaatatgcatcctctcctactaccttaaaacgtactactgctgatttttctttaactgtcttgtagccctgtgccacctcctgtgcagaaagcggtgttccacaacgaggacagtaaggaacaatcttgaagcccttgtaaagaagtcccttgttccagatttccttgagagcccaccactctgactcaatgaaattgtcgtcatatgtgacgtatggattgtccatatcagcccagaaacctactgtgttggagaaatcctcccacatacccttgtatttccatacagactctttacacttcttgatgaatggctcaagtccgtagttctcaatctgatccttgccgtcaaggccgagaagcttctccacctcaatctcaacaggaagtccgtgtgtatcccagcctgctttacgtggcacatatttgcccttcatggtctggaatcttggaatcatatcctttatggtacgtgtctcaacatgtccgatgtgaggctttccgtttgctgtaggaggtccatcatagaatgtgtatgtctctccttcttttctgttttccatagattttctgaagatattgttctctctccagaactgctctgtcttcttctcgcgttcaacgaagttcatattggtgtcaactttgttgtacatgactatctctccttattctatattgttcgtgaacatcccaacatgcacctcaaattcgactcttacgaggcttccttgtggcttactccactagaattttcggtttatggaatattcacaaaaaaaggcacacattcctgtaattaggaacgcgtgcctgatacgtctataccacctattacaatgtacttaagggaaatacccttgcatacccgcccctgtaacgtagggaatacgtcagaacctactctcgcaacgctgtatggcgattttagcctgcggctcagaagtgattttcaaaacggctctactcataccggctctcacctgccccggctctctttgactttcctgccatctctactgtcttcgtcactgccttttactaactgtgtttaagtatataactgaaaagccactgttgtcaagatgtaattgattctgtaataatttgataataattaactctaataaatgccatcatactcaaaattctgataatcaaaatcatcataatcataagaatcataatcataatcgtaatcctcataggaatcgtcatcattataatactcatagccctcatcaaagcccttcatgaactccttttcaaaatctgtgcttacgtttgagcctgctataacccagaatatgatgctgactataactgagatagctgctgttgctataccaactataccaaacaccttgttgttgccctttatgatatgtataataccaaaaatgatagcaagcagagctgtcacataattgatgcatgtacaaaacagtacaatagatgcgattccaagtaccagagaagctataccaaagccattgctgttctttggcggctggttgtatggattagctccatactgtggctgattgtaggctgtctgtccgtatgcggtctgattgtagccaccctgtccgtttggctgctggccatactgcgtctgtccgtaagctgactgattaaatgagccctgagcatatgtgttctggttgtatgtaccctgggcatttggattctgattgtatgtaccctgatttgcataaccatatgcactgcccggattattgacatatccgtctgtgctgcctgtctggtctgatgactgtccatatgcattcccactttcctgctgggatacagactgattatatgtgtctgccggctgattgtatgtgtcctgcggctggctgtatgtgtctgagccatttgctgtttctgaagactgaccgaatacacctgtattgtccggtgtgcctgacgaccggttgtcattgttcatataattgttatcgtccataacttcctccatatatcctattgtttatgtagccattgtgttattgtgttagaaatattttatcatatattacaataatgtaaatatttttatcataaaaaatatataaaaatggcaggagcaaatgcgctcctgccgtaaaaaacatattactgctcttagaaatcaaatttctgactaagctcttcctcactctcctcaacagagtttttgaggtcatccgcaagcatatagatattttccagtaccttcttgcactttgccatgctctcgactgtggtatcagccatgcgaagtccctctgttgaagaagctgcgacctcttctcctgtagctgaaaggtgtgtgatattgtctgatatgactgttgttgaatcaagaatctttttgatactctcctcagccacattgatatccttcatcaacagctcaacggcctctcccatggcattaaacttgtctcttgtatcgacgataagctcattctgcttctctaccgatgatactgagttctcgatactctcgttggcacgccttgtgtcctcattgagcttgtttataatctctgtaatattggctgatgcatcctttgtctgctctgagagctgtctgatttcatctgcaactaccgcaaagccctttcctgcttcacctgccctggccgcctcaattgaagcattgagagcaagcagatttgtctggttagaaatattgataatcgactcaacaaagctctttacttcctctaccttagctgtaagactctggataactgacactgtaacattgcttgcctctgccacgttgtgtgcctgctccttgagttcttccacaacatcagctccctgctttacggtctcatcagtctggcgtgaggcatctatcatagccttgattccactttctgcattgtctgtatttccctgaatatcaacacacatagctgcctgcttctggatagcctccgcagtgctctctgtgctgtctgctatctcctggattgaactatggctcaccgcaacagactcatcgagatcatttaacatggtcatagcctcgtcaaagtgctttgaaatattctccgcaaccattaccatcttcttattgctgtccacctgtgccatagcagattctttgatttcttccatattttcatcgaagaaatgggtaagaagaatcgtgatgctgtctgacgcatatcccacaagtacaagtacaaaaactgctatcacatcattctgaagaactgtaccccctattccaagctgcattacaagcctgatgacgctggatatgattattactgcgttcatcaccatcatcatctttatatccagatatatcatcgctgcaataacaagcggcagggcatatgtccatgtaccgattgttgaattgatcagtgcgataataaaatatcctgctgtcatggcgcttacaagtataagcgcacctgttctgctgtctctttttgtaataaatgcaattacagctattactattactgctattgccgcaacaagctgtatacttatcctggtaatatcagcatcttttgtcccaactgctgcaaataacgtaaatgctatatatgcaaatactatgattaccgccaggaatacacgtttgttggctctgttatactgttgactattcataaaatcccccttcttttgtttgagtttttagagtagctttattatacaacatttttttataataatccactactatttagtgccaacgtaccatttttctcattttgctcctgatttgaagaaaattctcctttcaaataaacatttacacaaaaacacccggcagttatcctgccgggcatcctgtaaaaaaatatttattctttaactccaccaagtgtaagtcctgtaacaaagtatttctgtaaaaacgggtaaatacatatgatcggaagcattgttataattgttgctgcggcacgaactgaggtaggtgtaactgcacctacagcatttttcaatgtttctgctgatcctccctgatttgttacagttgaaagaagcttcataagctcatactgtaatgtagtaagctttgtactcatacggttataaagcattgcatcaaaccatgagttccactgtcctactgctacgaataaagctactgtcgcatataccggtttgcagagaggggaataaatcttcagaaaaatggtggtatatcctgcaccgtcaagctgcgctgattcctctaagctgtcaggaattccattcatataggtcctgataacgagcatgttaaacgcactgaccattccagggactacataaacccaaaaactattggtaagcccaagtcccttgtacaggaggaaaatagggattaatccaccattgacatacattgtgataacccaaaacagggataaacctcttttgaacaaaaatctttttctgctgactataaaagcaaggattgcatttgccaccagtgctaagactgttccaattattgttctggcaacagtaatatatgctcctgttataagattatttttttgcaaaaccgttatataattcttccaggtaaactttcttggtaagaggtaaattccacctcttaatgcatctgtaccatcattaagcgatatcgcaagtgtattaagcaccggataaagcgttatgatcacaaacagtaccataatgatgccatttacaattggaaatatacttatcttctttttctttttgctctttacagagcctgctgttatatctgccatcgtacaagacctccttaaaacaactgctcttcaccattatgtttggcaattctatttgcaataaatataagaattatacttaccacactcttgaatatacctgctgcggtacctattgcataatctccctggcttatgccccatttaagtacataaatatcaatagtctgtgatacatcctgtaccaggccgtttcctaagagatactgtatctcaaatcctgcatttaaaacattacctacattcataagaagaaggattataatagttggtttgattcccggcagtgttacatacttgatctttgcccagcgtcccgctccatcaatagatgctgcttcgtaaagtgaaggatctattgatgtaatggctgcaagatatatgattgcattccatcctgtttctttccatacattggcaaatgccactatcggccagaaatatcccggatgtgcgaaaaagtttatcggttggtttataatatgcatatttacaaggagctcatttacaatacctgttcctgaaagcatatcgtgtaaaatacctgttacaatgatccatgaaaggaaatgtggaagatatgatatagtctgtactactttctttccaccctttgatgcaatctcattcagtaagattgcaaatgcaatggctgtgacaaaagttacaaccagattgataacacccattgcaagtgtatttcttataacacggataaatgtcatatccgagaacagcatcttgaatttgtccaatccaacaaatgcagaatggaatataccaagtcttggtttgtaatcctgaaatgccattgcccagccagcgagcggtagataatagaatatgactccatatgccaccattattgctgcccagaacagcagcactttctgacgtttgacttctttccatgtaatttttgttctaggttctctgaccttttcttttttgttttttctcgttaatgacatgacaccactccttaaaggtagcaggcagataaaacgctattatatctgcctgccttaaatttcatttaagctttatttgaatttagcagcctgctctaatcttgtatcaagctcggtctgtaattcacccaggaaatcctgtggattacatgcattgtatttatccatgtatgtatcccatgcactgtcaaagtcttttgccataacaacctttggaagctccgcatgcttaagctcgccaatctttgtccaggctactccaccaggagtgcttgtgttaaagttgttagagaatgaccacatcggataccagtctccaggtgcatcgtttgttccaagcatttcaacgtatgtcttaacaccataggcatcgaaagcctcttgtacatccttgttaagaccatcatagaactctcttgcctgtccatcaggtttgttggcattgattccatcatcacttgttccattgtactgtgggaagtatgagtatgagcatgaatgagaagccttgtatgctgtatcagaagcctgctttctctcatctgctgttttgtaaaactcaccattctcatctacttcatagtcagtacccttgacaccccagaatctgagattgtggatatcctgatcaagaagatcatttacaaacttcatggccgcatctacatcatcgcaggatgttgtaacagcaagacctgttgactcgttgaaagcgccgcctgcattgtgccactgattgtcacgaccgtcaattgttacaggtaccggaatgtaatcgcatccctgctcatcaaggcctgcctgtttaattgcatcacctgctgtgtatgcaaaatcccaccactggtcaatcattccaagtacacgtcctgtagaaagcttagagatatattcatcatatgtctgtgtgaatgactcaggatctacaattcccttattatactcttcattgagcttcttgaaatatttaactgctgtatcagatgtattatagtcaagtactttctttgtatcaggatctaccatacatgatccatcgtttggatatccgtcaaggaactgtggtgcattctcaagacagaaatatctccagtcctcacaaaggattgtatatggaatattttttgttccatcagccattgttggatttgcttcattatatttctcgatgaggtcaaaatactgatccagtgtcttgatttccggatagttagcccatttaagtactcttgcctggatccagaatgcctcgtcattgtgtgtgcagactttctcgtctccctttatgcagctaaactgtggtatccagtagatatgtccgtcatcctgacgaagtttttcccactcaagttctgtgaaaagatttttgatgtttggatatttctcgatgtagtcatccaatggaacaagtgcgcctgcatcatataactgcatctgtccacttgcaccttcaatgaaatcaggatactcgccacctgcgatcattgttccgattgcctcatctgctgtctgtccggtaagccaggtttcctttacccttacacctgtcttttcctcgatgatcttctggatttcattatcatcattgatttcagatcccggtacagcaaagaatgcatcaaactctttcgcacttccagtttcagtgccaccttttttgccactatcattgccacatccggcaaacagtgttgctgccatggtagccacaagcagcatgcttacaatcttttttcttctcatatattgtaatgtcctcccttttgataacttaattttatactttttaagttttcaaacaatcggagtaactatagtcaaaaacagggtaaactatagtttctagaaaaaactataatttaccctgttttgcagtaatatatattattctccactttgcatctggcgtctgaagcgcgccggtgtgcagccttttatctgtataaacctgttcacaaaataatccatatcatgatatccgacttcctctgctatctgtattatcttcttatcagtcctaagcagaagctctgccgcccgttccatcctgtaattgttcagataatccttaaaggactgtccgtatttttttctgaaaagctgccctaagtatgcactgtttacataatacttctcactcaggctcttaagcgtgatgttcgtggcataattgtctcttacttccttttctaccataccgatcacacctcttgacacattttttctaagctgtgacagataatcaccatactcacagcaaaatctggtcatatgtgcacggcttcccctctcaatacctgtcttaaagctgctctcacttatgagtcgcaaaatctcctgctgatttacattatcatcctgctcacttgccaggtgtatgaactgaaacaacagataattaatatttaagttcatgctttccccattcatacccatgctggacatctcatcataaaatttggcaactgcatttcttatctcaacatggttgttctgttccactgtcctaagcagcttatccagactatctttacaaagcactattccatctgccgatatctttacttcatcctcatagtaatatatgttctttactatgcgaaagccctgaaacgacctgagcatacatgcattgccgtatgatctggctatctttgatatatctgatacttttcttccgaccagcataactatattcttttgtgtattatcacatatataccttctcagatcctccagatattttctctcgttttttgcggcttcctctgccatataatctgagaatataaagcctatgtcatacactttttcatttaccgatacatcaaatacacaatgtgccgaatcatcccccagaaaggcaacacagctttcgtacatcttgcgctgtaagcttctcatatcactatcgagtatctcatcacctgccggaagctgctccatctgtatctcaacataccttgctccaccctcacacctcatattttcttttacatagttcaggtttacatcatcatatttgccctgtataagagatatcaggtgtcttgcaaggtatgcctgtttcatctttttgttatcctcgtcgatctggtttttctcgtttttgagcacaagaaccttgtttagtaccttaagcagcatctccttatccaccggctttagtatgtaatccgtacagtcattctgcatggcctgctgcgcatagctaaaatctgcataaccgcttaatatcacaaaatatacatctgattttttatcttttctcaaagtctcaagcaactcaagtcctgtcatctccggcatccttatatcggctatgaccagatccacattctcattttccagaaaccacagggcttcctttccatttgagaccgttcctgctatctcaaatccttcattttcccaatcaatgatcaccttaagcccctgcattatgaaaggctcatcatccaccaataatactttaagcattttaaatctcctataaatatgtttccggtatttttatcatcacagtcgtaccgcagccttcctcactgtccacatcaaatactgctttagattccgttaccattttgatacgcaggcaggcatttatcacgcccactctgccaccggtatttaacatatcgatatctgcatttttcatgttacttttcattttttcaagagcatccggatcaattccgctgcctgtatcctcaacctctatatgcatgaacccggcttttttgaatatacgcacaaatatccagcccggagcagctttactttctatgccatgcacacaggcattttcaacaaaggttacaagcgtaagttttggcacctgacattccatgcagtctgcttctatatctatgttatagttcagccgctcgcaaaaccggtatttctgcaatgccagataggcttttacaaattcacattcctttgcaacggttacagcatcatttccccactccacatactgtctttgcatgatggcgagtttttcaaccatatcagccgtctcattttcctttttcagcagactgtgcattcgtatgctctcaagcgcattaaacagaaagtgcggatttatctggctgtgcagtgcaagaagctcagcatttttctgacttacaagcatctcctgctcttttagcttattcttatatacagtctggatcaagtcatttgtgcggcttaccatcctgttgtaattttttatcatgctgccgatctcatctttgctctccctgtcagtcatagatacaagcttttcgctgtcaactgacttaaatacctttgaaagctgtaatatcctgctcgtaaaggaatggttaaagatacgtaacagacaaagtggaaagaatacatttataagcatcagaaaaacaataatcggtgcattgtgcataagcatgctccatatattactgtgtgtcttaaacacatatatatcaagctcacagccatacaaagagagcttctgcctgtatacggagtcgcttattttcccaacctcctccaatgtcttaaatggtttgttgattccactgtaggctccatttgacagcactatgtcatctccatggcagataagcacttcattatcataattcatattcttaagagtacgcatcatgctgccataattaaactctatcttgagtaccttttcgatatcagatgagtaaaaatccagctttttcatataaatcatatgtctttcatctgacaatccggctatgcctttttcatatacaaaaaagagtcctccgctttccttctgctccagaagtctgtaagaatccgtatttcttacagcagacatatcatttacttttccgccatttactattgtaggattgtcagcatacaggaaaaatactatattgctcattccaagtgtgttttcaaaaagtgtatcctgaaagaagctctgatactctgatacatactcagcagagcttgtgtattcctttgatataaaatcgtctatgcgcttgctggtgtagatactcttagctgcctcttctgcgttattgaccatgctgttcagattatatcccacagcacttgctatgctcgacatttcatgtctgctgctttctttttcagcattttctacgatggaaagcaccactgcatcagtcactatgagcggcagcatgacacaaagtacataaaatatgtagaatttttttctgagtgaataatcatcaagctttctctcaatggcattccatattggtcttctcataaacatttcctctgaaatcacttaaaggagccgacatatgtccgctcctaaagtctgttttaacttgtcattaattataaaataacatatttattattaataatctacccctgttttctctccacatcttgtaatctcaatgcattctgtccgcttgcctgtgagctttgtgcttctgtcatcaggctgctgtcctcctgcggatatctcataaatccccggcacagctacacagcttccatcctcttctatcacagcaaagtcccttggcgaaagagtcagctttactttcttagtctcatatggctcaagctttacaacctcaatcccctttagctgatatcccggctcatactctgcagcatcaacgtgcctgatatagagctgaactatctcatttacagtatatctgctgtcatttgtcacatttacaaacacctcgacaggttcgtttacatcactttctgctttatccactgacagtccatcatagtttgtctcaccataatgcagtccatatccaaatggatataacacattctcatttgtatagcggtatgtcctgtgagccattgaataatccgtaaactccggaagattttcggtgccctgataaaatgtaaccggcagttttccactcggactatactctccaaatatagcttccgcaacagcctttccgcctctggctcccggataccagctgtctataatggcatccacatgctcttctgcccaggaaagatctatcgcacttcctgctgacagcacaagtattaccggctttcctactgctgcaacagcctctaaaagttcctcctgaagtcccggaagcataagccccagcttgtcaccgcttgcatattcatttccggcatcaccctcttcaccttctatagttgcatcaagtccaagacacattacgaccacatctgactgttctgccatgatgagggcttccttaaatctgtccttttcctctgcaagtccctgtactttgtccttgtaaagatggcagccctctgcataaagcactcttgtatcctctccaagatattgctgcaatccctcaagtggagtgatatatcttgatgaggtaccataataatttcctataagcgcatccctggagttggcatttggtccgataaccgcaatagttttaacattttttctgtcgagaggcaggaaattgtccttattctttaaaagtacaagacttcttctggcagcctccacagaaagctccacatgctccttacattctacaacctcatacgatatgtcctcatatggcgatggataatccttcatcatgcccagacggatacgcacctccatcagcctttctactgctgccgtgatcgcctcgtctgaaaccagtcccttgtcataagcatccttaagatgtaaaaatgcacttccacagtttaagtcacagccgttgtttacagccatagcagccgattcctcaactgtatccgtcacatgatggtgttcgtggaaatcaagtattgcccagcagtctgacaccacatgaccttcaaatccaaactcgtcacgcagtatatccttaagcagtgtcctgcttccgcaggcaggttctccatttaccctgttgtaagcccccatgacagcctcaacctttgcatcctttacacatcgcttgaaggcatacaaatatgtatcatacatatcatgctttgatgctttcgcatcaaactcatgtcttatggcttccggaccgctgtgtaccgcaaaatgctttgcacaggctgccgattttaagtgatccggatcatctccctgtaatccccttatatatgcgcagccaagcttacctgtcaggtacggatcttccccgtatgtctcatgtcccctgccccatcttggatctctgaatatatttacattaggtgcccagaaggtaagtcccttgtatattccgtgatcacccttttttgaaaattcattgaactttccacgaccctccgttgatacaacatctccgatcttttctatcaggtcagtatcaaaagttgccgcaagacctatcgcctgaggaaatactgtagcaacaccggctcttgctactccatgaagagcctcattccaccagttgtattccggtatccccagtctttctatagccggtgactcatacagcatctgacttatcttctcatctattgtcatctgcgataccagtttttttgcatattctatagtttttttactcatagtgacttctcctttaatttatataatgattttaccagattcatgcagtattttctttctaattgttgccccacaatgttcaaaaattgctatttgtgctataataactatattcacgcaaatgcgcataaatatcagccgtatggagacaagtatatatgatcgaaaatctgaatggaatacatgagacagtaaaatataaagaaaacagcaatgtaaagctttttataaatgcggaagcagaagattatcccattcactggcatactcccatggagattatcatgccgcttgaaggcggctatacagtgcagattggggatgatttggtacatcttaatgaaagtgatattatctttatagcttccggtgtaaaacacaggcttatcgcacctgacaccggaaaaaggcttatcctgcagattgagtggtctgctgtctcaaaaataaaggaattaaattccatacttacccttatagcacctgctataacgctaaccccggaaacttccggtgatatccacagcaatatccgtaaactgctgcttgatatatcagatgaataccagaccgactcattcctatcagaagccgtgatctactccaaaatgcttgaagtacttgtccttattggaagacatcatactgccagcagttgtaattttaatgtcggcagacacaaacagcaggaatatctggagcgttttctgtctatctgtgagtatatcgatacacattgcactgaggacataacacttgatgaaatctcaaaaatagccggattcagtaaatatcactttacccggctatttaagcagtttaccaataataccttttataaatacttaaatcagaaaagaatagagcttgccctgacccttctggctaatcccaatatatctgtcaccgagactgcaatgcagtcaggctttgcaaatccatccactttcataagggtgttcaaagctgaaaagggctgcaccccgactgaattccgcaaaatgtttattgggtgagcattatgtatgaaaattctgcatagttattactattgctgccatttgaggatgcatacataccgaccgtacagcccacaaagccacctgcttcttctgtggtatatggcagcagacttattttttctgcgacttttacgctcttttcggccgtacctatccatatagatgcttcctgttccttacagatcatacatatattccacagtggatttttttctgtaatgctgtactccataatatctgccactgctatctttttgtcagttcccttaatatgtgtagtcaccacaaataccagccttccatcttccattgttatctcagcgcgaagatgattctcattgttctggaaaagtacaagtcctgccgtctcattatccgactgtgggataaaacgcactgctgtctttaccgtaaactcatagcccttctgtcttagtccaagaaatgcgcttgtgccaagatcagtgatctgctctttgtttgtgtacagtctcagtactcccggattttccttaagggagtaaaaagactcgttgcgttttcctattccaaccagcctcttatcaggcttggcttcgcagaaagttataaaatcattttctgatatctcatctataaatctgcactcttcaagcggtatatctacagtatcctcaaggtgtcctatcccgggtgctattaccggccattcgttttcccatattgtttttgcaataaaggtttccctgcccatgctgctgtgctttttgcatggtcttgacgcaagcatgaccacataccagtttccgtttatatcatccaccagatcaccatgtcctgcatagatgaccggataatccatccccagatttctgtgtgtaaatatcggatttctcggacatccttcaaaccatttaaaaagctccgtgcttcttgctatcgttatactgtgctccggtccggtgccgccctctgcatgcatcagataataatatccgtttatcttgtagatatgtggtccttccggccatatgcagccctttacagcgcctttccatatggccatgctcctgcccttaagcttcatggttccaagatcaagctcctgtatccatatctcccagtctccattgtagcgtactccttcagggtttgggcgtgtgccacagtaataacatctgccgtcatcatcgaagaaaaggcttgggtctattcctactgcttcttctcccaaataatacggatcagaccacggtcctgccggatcctgcgctgtcactataaaattgccgccatgcgatacattggtcgttatcatataaaaagttccttcatgatatcttatggtcggtgcaaaaatacctctcgatatttcttcattttccacgcatagctgcgatggtctgtcaagtatattgccaatctgctcccaatgagccagatcccggctatgaaatataggaacacccggtgcatacacaaagcttgatgtcaccagataatagtcttctccgactctacatattgatggatcaggataaaaacctgaaagtattggattttttgctgttaccatgtctcttacctctcattctctataatatatatccaaagcccagtatcgtaaactgcttgtctctgtcttcctctgcaatttcaattcttacaacatgattttcactggtcttattgttaaatattattaccgcattgcagtgctgccagttattgatatgtggatcagccgtaaaatgatattctccgtccacatatatcttcgcctttcccacgtttacctctcccgaatccttaaatacaaggagaagtgccctgcactccatctcaagctcgaaatacgcttttgccctgtttaatgtattttttgtgccatcatacatccagttatacgggaattccggagtcagcgaaagctgatcatccatctcaacgctttgcagctgtgtatctgtcgattcgaagccaccctcgtcaatatatgcctttgcatatatatcctttttgtcgagcagtcttatattttcaaagctgtttcctattaccggtgcaagatttagtttttcctgcaatattttttcctctgtcagtcccagttcaaatgcatccaaacttgcatgccctgcctgatctattttttcaaaaagatactctatgcagtctgccatgacagaatggcctgcattgcccggatgaaacatatcatagaaaaactgatttttggttattacccttccctcgtcattttttaatgcaaactgaggggaaaccgcatccagtacgcttaccataggcagatcatagagctttccaaccgggcttaggcggtcttgaaggttccagtcatttgcaaatacggaaaaaagcaatatgactgccggtttccatggcagattaagtactttacgtacaaggctttcatagcagtcaccctctgtctcatccccctcatcatttacagcaaattcaataactactatatcaggctgctgtccgtctcttagtacatccctgtcaaatctgatcattcccagctccgatggtgtgccacccacaccggcttttatgaatttcacattattctttgcagaaaaacgcttctggaaaagctgataggatttgtatgcgtagcactctgtatttataggtgccgcacctgctccctgtgtgatagatccaccgatgtatgcaagtgttacctcttttccggctcttgtcttttcgatggcttttcttatgcggtatgcatttcccatattcataagcgaatggcttatcatcctgcagtattcatcagagttcatatccacctctgtttcctcaatatctgccggagcctcatagccgtcattcagatacagtctgacactcgcttttcccatgatatccggtgtattaaatatgaactttatctgtcccggtatatcatcatccggtgtccacttataatctgacaggtatatctttttctccattccatcgcctgtcagctttaccttaagattagtaccgcctccgtacaggtcctgctttccgtacatctgaaacacaaattcgatctgttcgttttgattatctgtttccacagatacacctatactgtgtacaagccttccaaaaccttccactgtctctaacagtcccagttcctctttattttctatatttccggctatctgtgcactgtttatcagtcttccgtcgctttcatatataaaatgtataatgcttccatcttcctgtactgagccatatatatccttatccttcatgatgtagaaatacggtctttttctttccggatcctttggtgcttttggccctgccatctttctgcctccttgttgtgtcgattttatcagctataatgattatatgatacaaaaactcccagtgttttgcaccgggagaaattatagatatttgtcctgtcttttatagtttatgactgcttcatcattccagcttaaggttcttgtatattaaaatcaataaatcctgtaatttcctgaaagtgctaacattgcaaacatgtaaaggaaattgtcatagtatctcctgtcacctgtcctaagcggagtgttccagaacttttcaacacattgctttgcatattttccatctgctgcgagtgaagcttctgcattaacagcaatgattgctaccggatgaagtgccttctcatcaagcggtgtaccatctataagaaatacaccatcccaattgtccttctgatcctcacaataaaacttctgaagcctttctgccgttttaatctgccacggatctgcatcaaaccacagatgatccatcgctatattggcgatcgtgcggtatgcatcactgtaataccagtcatgtcttccaaatatttcctgatgccccgtatgaggctttccgtcataatctgcatattctgcgctaagtcctgtcttttcatggcatgcactgtgcagatatgctctgctggcagctgctgcttctttccagaagtctcggtcctcctcataagccctttgggcaaaaagttcataaaaatgcggcagatggtatgaaggatcactgaaatccatatttgtgacaaactttatcagcttgttggaaggctcccacattggctctccgctgtgtcccggctcacccttgtgtacacactcccttaagatattttgtgcctctttgctgtagcagaatataccatcgccatctccccatcttttagaggcgaaaaataatgccattgcaaaatactcttcaccatcaggtgccggtccatcggcatttcgctttccgtttgtctgacatgaccacgcaaaataattttttgccggaccatcttctatatacatatatgtgcgcacccatttccacagtctgtcaaactctgcttttttgtccagctgtacacataccatcatgccatatgacattccctcggttctcacatcatgattgccggtatcctccatatatcccatatcatcaccggcttcatgataaaaacgttcatcatcattcccatagaatatcgtgttaaaagtatcctctactcttttttgaatttcttcttccggatacccatactctttgaatatatttctgtatttgcctgtcttatatgctcctgccatttttctctcctttttgtcgctgttttactgtatcccgcacattaaatttacaaatctgtgtctgcatgatgtccaggattcattatctccttttttgaaccattctttctgtgcactgtccctaattccgtatatggctgttatgttcccgatgatatcatcagatatcgtgctgtctgccattattatcataatcccttttatcctgccttcacccgacagattatccatgatatttgctatctttccctgatgtatccagcaaaaatttctttcgtccgcagcacactcaagcacacatactctgccggtatcacaattatcctctccataaccggctggtgtataaacataattcatactgacctgtccgtctccatcacacgaataatggatatgtatctgaccatgatctgttttcttaagctcatgccagctaaagttcctctcaggtacctcagcaaagtttacagccctgttatatccgaaccctacaggtgccgcagggtttactacaggtgttccatttaccataaatgtcacatagttaaatccctctgccggattgcctattgttttttcccagtaaccatcatttttctttgatctgtaaagaagctcctccgtgccattttcaagaactacgccaacgctttttgcatcaggtgcaaaaagatttacttcaatgctattatcatccgtcacacggataccatgtatgacatccggatatttgccagccggttttccatcctcgtcattttcgaactgtatctgcctgtacaccggatcaaaaaataccatgctctcatccgcctgtaccggtgtggtagaatcaatattctttgatctgaccgggacagctttattaatatcatcaagttctgcgtcatcccatgtaaaaagcatctgtgcgaaatccttaaagctctttctccatacatgccattcatgatagccctcatatactttttgtgtactgtttttcccatgtcgtgaaaattcctttaccatctcatttattccaagcagtatctctttttcttcatctcctgccgacataaagacagcttcaaaccgatatgggctgtcgatgatttttttcatgagatgtattgcaacacctgaaaatactccaactgctgaaaaaagctccgggtgtcttgccgctatatccgtagcctgtcctgaaccaagtgaaagtcctgccacagcacgattgtttcttccttttttgaccttaaaattttcctctatataagggattatgctatttacaagctcactgtcaaaatctcccggaaaaaatacagggtattcgttatccttaaatgcgtagccactgcttgcaactatgatcatcggcacacattttttgtctgctatcagattgtccatgatgaaattcatcttaccctgccatacccatccggtctcattctccccgacaccatgctgtaaatacaatacaggataccttccatctccgctctcatatccgggtggagtatacacatagctctcctttatgtgaccgtttacctgtgaggtatatttgcacaaacttaccgttccatgcggcacatccctgacaaaatagaaatcctcgccctcttttggcacttcaaatgtgtttattgcagcaaaacagccatatgatatagccgcatgaggatttgttatacagacatcatctacataccagaaatagtaatgcattgcccagtggaaatctttaatatttgccgaaaagcccccctgcatatcaggctttaaccgtatgcgttctgagctgaaatagcctcccattccggctacttctactttattggcatttggcgcatacatataaaaggtaacacttccatcatcctcaagtgtgaccgagcacctgttattgtccattgatgatggtatcgtacctatatacaaagcaccgttttttaaatcatccaaaataaaatccccccattcgtttattgatatatacaagtgtaaacgaacaggggcttgttattctattaataaattgccaaacagtattcaaatattgctaattttcatttatcttttgctgcaaataatcaaaatatatatgtggattacaggcattgtactcctccatatactgatcccaggcagcaccaaaatcatctgccattatcacctgtggcagccacctcttcttaactgcctcaagattattttttacttttccacattcggatgtcgtaggaatcgaatctgaatatgagtacatcggataccatgaacctggagcatcgtttttaccgagcagttccacataattttccactccgtatgcatcaaaacattcctgaatatctgcaggctgatttttatagaattcttccggctgatactccattgaaaacgcatttataccatcatcaagcattccctccacccttgggaagtatgagtacgaacacatatgcgctgtctgatatgagctgtcactttttttctctgcctgctcattggtaaggtaaaacaaaccgttttcatcgactgaatagtccttgccctcctctccccagaacctttctcttatgatatcagattccagaagatcactgacaaacttcatcgcaccttcgatatctttacaggaggtggtaattgacactcctgaagaataatctatttctgccatcctgtttgtatgccatctgttgtgaataccatcatcaatcgtgacaggaagaggaacataatcacacccaagctgtgccagattctgttttttgaatacaggatctattgcataataaaactgccaccactggtcgaccatcccaagcacagctcctgttgacagcttgtccagatattgatcataggtggcattaaacgccccgggatccattattcccttacggaactcttcgttaagctttccgaaatatcttttggctgtgtcggtcacattgtaatccatcacttttttggtttccgtgtctaccatacagcttccatcgtttggaaatccgtccagaaactgcggcacattttcaaggcaaaaataccgccagtcatcacaaagcatcgtaaatggtatattttctgttccatccggcattgttggatttgcttgtacatagctttctatcaggtcaaagtactgctctatcgttgtaatctttggatatccagcccattttaatactcttgtctgaatccagaaggcttcaccattatgcagcatctccacatcatccccatgtgatattccaaacggtggaatccaatatatgtgtccatccggctgtcttgacttttcccattgttcatcactgagatattcttttatgttcggataatcgtcccagtattcatctattggaatgagtgcatctgcctcatacagcgcagtctcacccaatacaaaatccggatattccccggttgctatgagagaatttattgcatcgtccttatcctgtccaacaagccatgtttcctcacattcagcaccgatctgctctgctatgagctgctttatatcattatccggatctatattatctccttctacagaaaaaaaagccgtaaaatgctttatttcttttttatctgacgctttaaaagtaacaccggctataagtccgataaacaatgccactgtaaccgctgcggaaaccaatctttttttcataccatgttttctccctattttcttttgttcagtctctgctataaaattgcataatagtcattatatcccataaaaaatatttttacaaatcctaaaataaatatatctaataactagggtataaaacaataatttatcctgctgacattttctctgtcatacattataatttatacaattttaaaaatcaggaggaccatataatgatcatacatgaaataacagaagaatgttttaagaaatatggaaaggtgatcgactctatagatcttacagagctggtcagcacaatgcagacagtagaaattcctgctgatgtggtttatgagccatccatttctgcactcgaaaagctaaaatgcgctacagaattacaacagaaaacatacggggagcttcctatacagataggctggtgcataggcaacaatcataagctcaatgctgttgagtatcacagatgctctgaggtcaatattgccgcaactgatgccatactgatactcggccgacagcaggatatctccgtggaaaatacatatgatacctctttgatggaagctttcaggattccttccggaacagcagtcgagctttatgccacaacactgcactacgcaccatgtaatgcatctgctggcggatttctggtagccgttgtacttccaaaaggcacaaatgaagccctggaacatccacacaccggcggagaagatgctcttcttgcagctaaaaacaaatggcttatcggacatcctgaaggtggacttcctgagggatcatacatagggcttacaggtgaaaatctggaaattaaatagaaatcaaaaaacagcccgggctttcgcccgggcaattattatattacgctttaactttatgataaaattaagccttcgcctcgtcctcgttgtctccccagaaatccaccggctcatagtcctgcagctttgcaaggaagcccttctgcttaagctcctcctgtatggcatcaagcacctcttcactctccgcacatattgtgtgatagtgataacctgaagttacatttttaagaaggctggactttcctgtgcggatttcctccaggtaatttctgacatcacgtctggacttgatgtccatattggcgcggatcactccgtagaccttgtggtatacaaatacgtccttcacatggcctccggcatcaactattgttgaaagctcctcctctacttcatcatcctcgtgaaccacctttaatactctcgaatactgcttatccgcctgtatcagatatcctctgtttgtcgaaaaaatcgcggctccgtttgctcgaagcagtgctatgtcctgcacaatcacctgacgactcacatcaagctcctttgcaagcgcaactcccgccacaggcgactttgacgaggatagaatatttattattttttttcttctctcatcaccgttcattttcgttcctttctgtaaaacattactgtcacagcatagtgcgaccggcaatctaaaatctatactgcatgtagatttttaagtgataaatccataataggcgctgaatgtgtgagcgcaccacttgatacatagtctacaccaagaccctttattcttgcaatattttctttggtaacatttcccgaaacctcgatttcggctctgccgtcaatgtagtcgatgcactgctttaaaagctctgtggacatgttgtcgagcatgataatgtcggcaccggcttcaaccgcatccttcaccatatcaaagctctccacctcaacctcaatctttctgacaaacggagcatagtcctttgccatggcgattgcctcttttacgccgccagctgctccgatgtggttatccttaagaagcactccatccgagagattgtatctgtggttgtttccaccgccgactctgaccgagtatttttcaaaaattctattgtttggagttgtctttctggtatccaaaagcttgataccggtgccctctaagagcgctgcaacctgactggtataagtggcaattccactcatgcgctgtaaataattgagcgcagttctctcaccgcataaaagcactctgatatctccgtaaaccttgccgataagctgcttattttccaccttatcgccatcctttacgtaaaactctacctttgtatctgcatcaagcagtgtgaaaactctctcaaaaacctgcagtccacagatgattccatcctgtttacagattaaatccacctctcctgcctgcggatgtggcatcacgctgtttgtggatacgtcctcgcttgtgatgtcctcctttaatgcgcttaatatgaatgggtctacgttgaggcccagtgttacctgatcgtacatatatttagattcctttcgttcaaattcattcttatttatgacggtttcgcactttttatgttgtgtggtgccggggtagtacgcagtatattcctcagaaaaatatgaagtcagccacgggatttttggggatagtgctttataatttgccacttgttcgcattaactgcgttaatggaaccccgtggcagttcatatttttcttcagaacacactgtgtactctccggcttcacagatttacgagtgcgaaacctggttactacagctattactgcacttaaaattgcctctactaggcatggactgtattctaccaatatttttgatgacgctcgtatggccagcctttggctgtccactcgcatctaggctggaacacagattctatgcctgaatgtaggtgacaccagattcgttttctacgctggtgcgtccctctatagcctccatggctagcttcctgtattctctctctacagctttttcatcgctgtagtctgcgaggtcgatgctatctgcggcctttttggctgctatctcatcatttacaaagccaagctccgccatctgtcctgctgcacgctttgcgaataccaggctctcaagcagtgaattgctcgcaagacggtttcttccgtgcactccgttgcaagcggtctctccaactgcatagagactttccatggatgtgcggctgtggtgattcaccttgacgccgcccatgaaatagtgctgtgccggaacaacaggaataggctccttgaagacatcatatcccatctccttgcaatgttcaatgatatttggaaaatgtgatacaagctcatcccttggaatggtacgcaaatcctcccagacaaagtctgtgccgtcctttttcatctgctcacggattttgccggtcagcacgtctcttggtaagagctcatcgacaaacctgttcatattcttgtccaaaagcttagcaccctcacctcttacggactctgaaatgagaaagcttctgtcctcatgctttttcgtgtaaaaggtcgttgggtgaatctgcacatagtccgggtttttaagctctatgccatgcttttttgcaatggcaagcgagtcacctgtcagatgtctgaaatttgttgaaaatctgtacagtcctccaactccgccacaagccatgacagtgtatgccgctgtcaccttttccagcgtgccatcctgttttctgatgatggcgccgtagcatttgttatccctttcgatgatgtcaaccatcgtcgtatactccatgagtgtcacatttgaaagcttcttaacctgtgcaagcaatgtgcttgttatctcttttccggtcacgtcttcatggaaaataattctgttgtgtgaatgagctccctctctcgtatatgcaagtgagccgtcatcatttctcgcaaaatctgctccgtatgaaacaagatccttaaccacatcaggtgatgagtttatcattatcccaactgactccttgtcattctcgtagtggccggcctttaaggtatcctcaaaaaagctgtcgaaatcagactgctctttaagcatgcacatgccgccctgcgccagaaatgaatcattgctctccagatctgactttgttatcagtgtaattcttatgtctcttggaagcttaagcgcacaataaagacctgagcagccgcttcccacaataagtacatctgtattcataatatgttacctcttttatttacctgcatccaccgatgtagccgcttctttagcaacatccccctggatgcgatttactgtaatgggcgtattataacactaaaatttacaactgacaagacacctgtaaaacttttgtgttgacagctggtttacagctaagtataatgacaagtaacttatttattttggccggttctttatgtaaaatccaaaaggggcttacattgatataactgtgcttcaatcacactaggaatttcaagaggtatatcatattatgatgacaacaagagaattacaggatgagattatccgattaaagaaggaaaatgatatctgtatattagctcacgcttatcagagtcacgagatacttgaggttgccgacttcacaggcgactcatatggactcagcaagcaggctgccacagcaccacagaagaatgtgctcatgtgcggtgtccgcttcatggcagagacctgcaagattttatctcctgacaagcatgtatttttgtcaaacagcgcagcaggctgtcctatggcggagcagctcgatgtagagctcttacaatcgttaaaggccgagaaccctgactatacagtggttgcctacataaacaccacatcagagcttaaaaccatatgcgatgtgtgcgtcacatcttcatccgctgtaaaaattgttaaaaaaattgacaataacaagattcttttcatccctgactgcaatctgggcgcatgggttgaggaacaggttccggaaaagaccttcaaatttgtacatggtggctgtcctactcacctgcgcatgtcaatagcagatgttgagagagcaaaagcggctcatcctgctgcaaagcttctcgtacatccggagtgccttgcagaggtttcaaaggctgcagactatatcggaagcaccaccggcatcattgactatgctaaaaacagcacagacagggaatttatcatcggaactgaaaacagcatactgcagcacttacagtatgagtgccctgaaaagagcttctatccgctctcaaaagactgcgtatgccacaatatgaagctcactaccctgatggatgtatacaattgtgttaagggagcaggcggagaagaaatcatactgcctgacgatataagaacaaaggccaagggctgcatagataccatgctcacacttggagagtaatttaattgcaatattaaaagaccacagagtctctgttttgctctgtggtctttactttaattaattgatgataatacctcatctgaatatctttctttaattttcatttccagcacctgaaattcatgaatataactgtcaagcaccttattcacaagctgacgtgcagcttcctcattgtatatatgagttgtatcattcctgtctcttaacattccaagccagacactctcatcaataaaatcataatacgcatatgcagtttttataatttctcttggagaacctgttgcagcctgattagcgccctcatatcgtaacagttcctttaagaccttccagcccagctcaaattgtatataatatttatcaattataccgctcacaataaaatcatttgtcaagtcttcatcaaatgcccttgacaatatcctcaagtggctgacatactggtcaaattttttcatacaataccctcccatccctttctatttctgtcaccagtaccggtgaaatatgcttatcatccatatttattatgtccagctttagtaaagaccacaactcctcattaagacaatccgataaatcaccaaaatcctcacatccataaatggccagatcaatatcacttttaggatgattcgtgcctctggcgcgtgaaccaaacagcactactttttttgtattatatttttttgctatattaacaatttgcttatatacttcatccatataatactccttatttcacatccgtctaattgaatccaacaaccttctgtgacagcttatacgcaccgatagctacctttctgcctcccttgcccggcaggttcattaactgtcccatgacgccatggcgcagcttcttgtaggtttcttcatcgtgctccttcatgtatgcccacagttcatccttcttagccatgttctcatcggtgcctgagataattgccagaatagtagaaatagtcgtaataatctcaagataactgtacatatacttcctgcacatctcatttgttatctcatgcaatttgacatcgtcaaacataatcttatttacacgaatctgctggtcaatacggcgtatcatcacctgctcattgaccgactggtcatcgcgaccgataaaatatctgtagaagtccacatccagatagtacatcgtgcgcacatacggaagcggcttatatacatagatattatccacataaaaggtatgctttggcagcttgagtccacagcttctcaaaagctctgtcctgtatattaccgaatgcatcagtatgtaatgtcccttgtgaatatgctttatatcactccaggtaaatatctcattgcgtggaaagccggtctgacgcataacctttttacgccttgctccttctttctcgtagacatagttggcaagaagcatatcaatctgtgtattctccttctcaaactcccttagcttgtccagtatcttcttgtatgattccaaatccacccaatcatcgctgtcaacgaccttgaaatatttgcctgtggcatttttgagacctgtgtttacagcctctccatgtccaccgttctcctggtgtacagcctttactatgtcaggatattcggctgcatatctgtcagctatcgctgctgtctcatcctttgaaccatcatcaacaataattatctccacatcatctccacccggcaggatagactctatacaatgctccatgtaatcctttgaattgtaacatgggattgcaaaacttaataatttcatctttttccccttgtaaaaaaaataatatcgctgtttgattatgcataaaattttatcctatatgcaataacaaataccgatactataattatacacaaaatcatgatattgtctaaggattttttatggtaccttaggactgcacagtttgttcatattttgtttacagaaaagtgaaattcaaaacacacggttttcacaattgatttgtatactaacatcataaacgaaagatacaaaataaaagcaacaaaacatattaattacgcaatactcatactaatctttttcatatatagccgatgcaagccacatgcatcggcttcctctttatatatcagcttctctttatcttacgtgaagccgtcttttcaaactcactctcccttactttaaggctatagatacgcttgtacgcaggtacatttacattgtactcatcgataagcgcctgcagagctggccttatatcggcgatgcctgtattttgagcatactctctgtccgggaaaatctcagcttcaatcactccttcagactcacgcactatgatttcctttatgagatgatttacgctcagagcgttttcaagctcctccggtgacacattctcaccgtttttggtgataatcagattttttcttctgccggtcagataaatatatccatcctcgtccacatagcctaagtcacccgtgtgaagccagccgtccgacagtgtctcctcagtctcctttggcatcttataatagccctgcatcacacttgtaccgcggacaaaaagctcaccgtcaactgtttttgcctcacagtttggcatcagcttgcctaccgagtttttacggatatcccagcttagatttgtgcttatgaccggagaacactccgtcatgccatagccctgcaatatggtgataccaaactctgcaaataaatcaacataatcaggatttaggtacgcaccgccactgcagattgtatgaagcctctctccaaacattttcttacggaccggctctgcaggaagtcctgctgcccttacctcctcgagctttctggcaaatgtctcaatcataagaggcaccataagaatcatgtcgggagtaaaaagctgtatattttttgccatgcgcatgatggaatcattgatgcagattaccgaacccagtgaaattcctttcagaatatccatgctcagacagtatgcatggtgtatcggaagcacagacaaaattaccgtgtgaggtccaattttcatgtcaaggcatgtggcattttcagccaggttgttctgcgtcagcatgactcccttgctctttcctgtggttccggacgtaaacatgatagtgcaaagcgcatcctctgccactgccggctcgtagcttcccctgttgtcatctataagccctttaaacgaaagcacctgtggacaatgctctgtactgttcatagacacatacacatttatatcatgacagcttttagctgcggcctcagccacatccgaacgtgcctcatcaaatataagcatcctcacactggctctgtccaaaagctcacatatatccgctgccggaagcgatgcatcgattggaaccgcaacacttccgctttctgtgattgccagatatgatactatccactcatatgatgaagggcctattacagcgatatgctgcccttttttgccaagcttttcgatggcattggcaaagctgtctgtatcattcttaagctcactgtaggttcttgactctatctcatttttggatttcttccatcttatcgcgtcatccgcgccgtaagcttcatttgcatatgaaagaatatccggaattgtgtgaaataacatatttcctcctatcttcacccattatgcgtcttttaatgtctcaagataatcgactgcttcctgtactgtgcggatttctgcagcctttgtctgctcaatctccacatcaaaggtatcctctatctccccgagcatgctcatgaagtcaaatgacgtgaagcccagatcctccataaaacgtgactcttcgtgcacatctgccggctgaacatcaacataattacagataatttccactaattcatcaaacataataatctccttttacctaatacgtttcctaatccactacactaatttaatgatttcgcctattgtaagctcagggttttctgctcccttgaacatgattttgcacaggtaatagtacatatactcaagctgctttcttgagactgccttgacctgatgctcgaagctgaaatccagtccgttgtcctccgggcggtgcattaccgttagatacatagcctgtgtagtcatgccgttcgggtaccacttagtcttgtattttatatctcccaggtcgtttaagcccttttcctttaaggtcataggctgatatgtaagcgacatcggctcatatgtaagccccgcctttggctgcggataggtctttgagcgcagtgcaaagtactctgtcgggttgtagtttgcatggcggaacagctcgttttgcttatccctgatggtatacacggcatcaataaagcgtacatcctttgaaaagcacgtcctaaacggaaacgaatgaatacgtgtgccgcctgacttcttctccttaagtgtcgcacgtctggcgatggcattgtttacggagacatcatcgaagccgttttccttctggaaaaacgtcctgattcccatgagaagcagacaagcaagcgaaatatgatatttctcgcaaaaatccataagacgctttgtcggctcagcctccagatgaaagatatcaagcgctgaggtgacatcatccgatgcattgaatgcactccttagcttgttatcatgcatcagttctcttgccgcatcaagctttgctgtgccgtcgattccgttgtagattggctccgactgtctgataagcttctcaaagaactctctgtccctaagctgtgccttacttccggcttcatatgccagatcctttttaagctgctcgatatatgagcacatatcctttggaaaaggtactccctcatacatggcattacagtatatctcaataatatcctttaaaaatgcaataagtgactgcgcatcaaccaccatgtgatgacctaagaagtacactccattgaatccatccggcatctttatcatcacgattttggtcataggagagtcctcaaactcaaacggcacctgtgtccagccttgcatctcattctctgcctcctccatggttacatccgtaaaatccttgaaatcgacagttctctctttaaaatcctcatccacatccgcaatatactgatagcactctccatccttatcccttgtaaagcggatacgcatggcctcgtttctggcatacgcgtagttgattgaatcccttagcacgttccagtcaagctccgtgccgattgtcaggcttgtacctatattgagtactgccatattcggacagtactttgcatagtacaaatgaaatttttgtgcaaccgtaatcggatatacgttgtgtccctttctcgtcttcatcatctcataactccttccaaaaatttatcaagtgcgtcctcgaaagctttcgtattcttgtaatagctctcgcagtgtcctgcaccctttactatcagctttgtcttttgtgacgcgcagcttgcataaagctcatcacacatgctacatggcacaaatgtatccttatcaccatggataaacaaaataggcagcttcgccttttgcacctcttttgcagcattgcattcatcaagcccataccctgccatttttctgttcacaaaatctgcaatctgaatcatcggaaaagccggcagatggtacatgctgtgaagcacatgtgtaaataccgccttaggcgaggtaaatgcacagtctgacacaattcccttcacctgctccggcagattaagtccacttgccataagcacagtggcacctcccatggaatttcccatcaaaacaatccttatgccattgcctgccttcttaatcatccagtcaatccacttaagcgcatcatagcggtccttgcagccgaagcctatgaatttaccctcgctttgtccatgtgccctcgcatctacaagcagcatgctatagcccttctttaaatagtaattggatatgctgctgtaatcagacatagcttcacttgtgtagccgtgaaagcatatgacggctttatccggattacctccatctatccccggaaaatatgtggcatgcagtcttaatccatcatcggacctaatccacacatcctcatgagcctgtgctctcatccactctccgcgtggcttcataaagctgtaatagctctcccagtcaaccccggacatcttcatcgtgcgctccttcttggcattgtagcgcatcatggtcctcctgtagaaataagcactgccgcctgcctctgctgcagcaataccacctaaaacacctgcaattattccccacttcatcttcatcacctacgccttcttactgtctataatctgcttcaggcgaagtgccttatcaatatttccctccaccttgagcttgcctgttgtaaatgcaagactcggatcaagccttccttctgccagcttaaaaagagtctcagcgctgcatataaaaatcgcatccctgtcaaaatactcatacggctccactgccagcacaccatcctttacctcggcatagaaaattccctctgcctctcctgttatattgaactgaaaagcaaggtgctcgcttataccgctcacatcagactccataaacagtccctttacctttgaaaacatatctgcataagtcatatcaattctccttttcgaccgccggtcaacttgttacttcattacagtatcactttttcgaccgtcggtcaatataaatattttcattttcaaactattctgttattttttcataaactatccaaacgtatcatatcatttttaccaaaacctattcccccggtaaaatctcatggaagaatcatatggattgtgataatatatattaaaatagacgtaactaatataagaggatccactatgccacattccacaagaccaaattcggaaaaatacgagaagatacttgaagcgctaagaacccttttagaaacaaaaaaaatatcccagatatctgtcagcgaaatcgcccagacagccgggataggcaagggtagcatatattattatttttcatcaaaggaggctatctttgatgcacttatggcaaaaagctacgaagagccgcttgccaccgcaaaggagcttgcaaagcgcaccgatatatctccgtttgtgcgcatggcgatgatatttcaggcatgccgcaactcctctgccgcctttttaaaaatccagtccgatgccggaaatggtgtacaggagaatgcatttttgcacaacaaatacatcaattacctgattaccgagctaaagccggtgaccggtgaaatcataaggcagggagcagctgagggacttatcgtgtgccaacagcctgatgcgcttgcagagattgtgcttctcgtgctcgtcgtgaagcttgacaatacactgattccgtccacaaaagaagagaccgaacagactatctcagagctcatctcgctgcttgagaagggcactgacaatcctgaagggtctctaaatttcctgcgtgtctaaggacactatttatgcttttttctaaaaaaatattggactattgctgccggaatgattcctcccgctaaaatcattccttttgaaagcgccggtgttttacgtacaacgtgaggtgacctttccttactgtatcctacatatataggcttttcctctttgtctgtgtagtctgcctttatatatccgatagcattatccctatccggtacatataccctgattatattatcacgcatatcaccattaaaagctttatatgctgccactatctcataatctgagtgatgcggcagatactcaaaaaaatactgtctattatcaacacaccataacaaaagccatattacaaataccataataagtgctctcatgtcttctttttcgtttgaattttccataattaaacatgcctcgattttaattgtatatatacgtgttacactaactccggcactctgtagcctgcctcactcattgatttctcaaactcatccactgacattccaagcttctcagctcccctgttcaccgaatagtccccatcctgaaccgataagaatatttctgtacgacgtccggtctgaatgccagtctcaattccagtctcaatgccagtcttaattccagccttcataccttctcttctttgttcctcaccatactcttttgcatactcttttgcatattcttttgcatattccattgcgtactttcttacagcttcactcatagcaccacgtccttccttttctttgtaataagccaccgcttttgacaatgtctcactttttatcagctccggcctgcactgatgaaaatctctcatcatccgacctatatcatcattaccttcataccttccatttacatagataatatgcgaaccatctccaaaggcttcacccgtttcatcaacacgcctttgaatgtgataaaatggcagtccttttctgaacttatcgtgatcataaataaaaatcacgtatgaatccttaatctccttaaactcctgtccttcctccagcatcctcgcatccatcatactgctgtgatatctggctcttttgacatgcgatccctcagcattaatctgcacctcgatatcaatatgtctgccatcgacatctattgcatgcacatccaaggtaatacatctcccaccaatcactggattttttaattcatcctgcccccggacgtctataaccttaatatcacgctccattattacgcgaagcagtaactccgttgtctcgatattctgcccgaatacaagactcatcagattgtcatcaaacagcgtcattttgtcaatcaatccgttgatgattacatcgttctggccataattactgccaaaaacctcttttgtctctcccgacattattctcctcctgtttagttgtgtaagcaagaagaatagaatatcgcatgatacaaaatttcttgtcaatataaagcatcaacaaccccagtcagcttcattcacataatgtttctcaatcgacatatccattttccctgctattgataggtaacttaaagcattgaaaatttccatgtctttgtcgaaaaatactaagtggttctaccctcttcaaagtgatacgcaccgatgaaaatgtgtactgtggtgtcgctcaacagaaatataatgctttggcttgattgtagcattaaaaccgcaaaagggcaataaaaatatcaggcaaattcctattatcctattataaaagagagacagccgcgaaaccgcaaaaacagccgggcacatctctcacatatgtctgactgttttttatcgcttactattcagttttattgtagctgtccgctaaattctcctatagtggtacgcaaagtatatattgccggcgattgcggtgagcgtccacgaaatgacgtatatgagatataaggactgcagtgtcttaaaatacgcaaacaccgtgagcagccatataatcctgaatacgacagagcccataaccactatgatggtaggtgctacactttttccgatgcccctggcggcggctgtggcattgtccatgaatgctgatacacagtagacgaattccatcacaccaattctgatctgtccatagtgtatcacggcatcatcactcgtaaagagcaaaaggaacggtctttggaatataaacaatgccactccaagcaccagtcccatcagaaacgagtatgccagggtgatgaaaaatgtgctaagcaccctttcctttttcctcgcgcccagattctgcgctatgaagctggtacatgcggtgtaaaatgctgccatcatgtcatagatgagcgaatccgcattggtggcggctgaattgccctccactaccacatggctgaaggaattgatggatgtctggatacatatattggctatggcaaagagcgagtactgtatcgcagccggcactccaatccgaagcactgctgcagctgcatccctgtcaatcgctatatccttcatgtgcaggccgtagctgccgtatgtcttcatgagaaacctgatgatgagagccgctgagatgtactgtgctatgatgcttgcgatggctactcctatcactccgagtctgcacactattacaaaaaacaggttgagcactatattgataattcccgagatactcaggtatataagaggcctctttgtatctcccactgcgctcagcacaccgttaccgaaattataaagcgcaagcgccggcgaaccgcacagatatatcatcagatatgctgtagcaccgtctataagctcaggctttgtattcatcacttcaagcagtggctttgaaaaaaccagacctgccactaacagtaaaagtcccgctataaagcacagaatgaccgatgtgtggacagtcttatgcagcctccgatagtcctctgctcccatgtgcagtgccgtgacagcattgacaccgcctcccatgccaagcagtatgcctgttgtgagtgtgatgatgatcgtcgtggaaccgaccgagccgagtgctcttgcacctgcaaattttcccaccactgccacatccgtcatattgaaaaatacctgaagcaggtttgagaacatgagcggtatggagtaaatcagtatcttccttgcgagtggtccgttcaccatatccagttctttggtctgtgttgctcttgacttcattttttcctcttgtaaatctataattatatattaacactgccatgtgaacagtactctaattatagatacgtttcgttcttttttcaagactgttgtttacgctttacaaaaaagattatataataaagtcaaaatgacttaaggggtaaaaaatgtttctctgctgcgtcacgatatgaggcactttctgaataatatagctgccttcatcgaaaacaatgaaaacgacaaggccttagctcataaacgatatgcccgttgcaacagaaagagggcatggacttggtacaaaaagcatcagacagactgctgagagactgggcggcaaatgccagtacagtgtatctgatactatgtttatcgtgagagtaataatctaatctgattcatacaaaatagccggtgcttaacacaccggctattttaattcatatacaataaataattcaaatcataatttagaaatctgtgaggtttgcagctctcttctcaaggaatgctcccattccctctttcttgtcgtttgtatcatttacaacaccaaagaggtttgcttccatctcaacagcgttcttgatatccatatcatatccgttgttgatagcagcctttgcaactgcgattgcgtagcttcccttagagatgatctttgcagccatagccttagctgttggcataagctcctcttttgctactaccttattaacgagaccgatgcggtatgcttctgcagcgtctacattgtcgcatgtgaagatcatttccttagcacgtcccattcctactaaacgagcaagtctctgtgtaccgccaaagccagggatgattccaagtcctgtctcaggctgtccgaaaattgcgttctcagaagcgattctgatatcacatgccatagaaatctcgcatcctccaccgagtgcgaatccattgacagctgcgattgttacctgacgcatattcatgagcttgaagaatggctctgaagccttgattccgaatgctcttgcctgtggtgctgtgaaattaaccatctctgagatgtctgctcctgctacgaatgacttgaactcgttgcccttcttgtcaggaccacctgtaaggataagcaccttaacatcgtctcttgcctctatctctgttaatgctacatttaactcatcaagagtctcactgtttaatgcattaagagcagccggtcttgaaattgcaagtactgcaatctgatctgctacgtcaagtgttaaatttttgaactcgctcattgtataaatcctccttaaaaaacctatgtataaccgacatttctgtcgtaatttataaaaaaatagtaacactttgacaaatttttgtcaatgtctgaatgacctttttcaataatatttaccgtttaatttaatatacaaaatttaaggagacagtctgcttaatgcaaactgcctcccgccttagaaataatataatcaaattatttaattaaattaaatcaaaactcaaattacataagtccatgtgtcctgttgtaagcattgcagatcatatttgagttcttgataaggatgtgcatagcgatgaatggtccgattccacagataagtgtaccaaatatgcaccacatcaaaacagtggttccattctcctgaatgccaagtccgtatctgcctgcattatttgccagtctgttgcccagcttatagtaccagtaccatgcataaataccgcatgtaatcattgaaagcaggataaatgctacgagacctgatgtattctcgccatctccatcacatgctacattgacatcatgagccatcttgtagatgaaataatatccataaataccacatgtaataatagacaggatgatgtatgaggcaagacctctgtcatcctttaacctctctcccctgtatggtggaggagtctgaccaccattgttctggtagcctgtattgtactgtcctgctccgttattctggtagcctgcgttgtactgtccggctccgttattctggtagcctgcgttgtactgtcctgctccgttattctggtagcctgcgttgtactgtccggctccgttgttctggtagcttccattgtactgtccacctgcattctgctggtttgcactgtttcctgtgaaggactgctttacctcatcaaatgcacttccaagctcctgctctgctgcattgaaggcctctcctgctttgttgacaaaatcctgtgccttggaaacaggtgctccacagtatggacagaatttcgttgaatcaggaatttcttttccacatttctcgcaaaacatcttctttctcctttttatttgctatttattatacggatgatacgaaacaggatgttgttttgcggctcaaagaccacgacatcatcgcctgaccatatcaatctgcatatataaactatagcaaacataatgatgattgtaaatataattattttataaattttaatatttattttagatttacacaaaagcactattaccgcaataggcacaagccaaaaaagcggatggtatgcaaacgcctttgctatatcaaggtgtaaaaatgccatccatgccctcgacatgccacagcctgcacatgatattccggtgatgaacttaatggggcatgtgatgcctatcgactccatagctgtgtaaagtaccactacggctgtaacagcacatatgatctcttttctttcattttttcttttattatttcttttattgtccatacaaatgttatctcaaaaagtatgcactgtaaggtggcagctcaaggccatcgtttaatgtaacctgctcacctgtaatcaggtctgttgcatcaccctttcccatatcaaagcccgcgaaaaacggctggtctgcggcattgatgcacacaaacaccttttcgtcatcacattcacgaccgaaaacgcactgtccgtttgtgagcacaaccgaatagaaattaccgtagcagagtgcctttgactgcttctttgcctctgcgagctttgaaatccattcagtcagctcattgtactgtggcgcttcaaagcatgccctcagagccgggtcaccgtcttctttttttgccttctctccccactcactgccatagtacacacaagggatgcccggcataccaaatgcaattgcatagattagtggcagatgcttttcattggtcagtatgcttgccactcttgtcacatcatgattgtccacaaatgacaggaggtgcttacccttgtagagagtccactgctccggtccgaactgtctgagaagcgaatgatttatctcaaacatattcatggaattaaagctcgagtacagacccttatagcactcatagttcgttaccgagtgaagcatcgcatcattcataatctggttgtagtcaccatgcagtgtctctcccaccaggaagaaatccggctttagtgagtcgcagaactcccttagtcttctgaggaaatcatggtcgaggcagtatgccacatcaagtctcagcccgtctatatcaaactcgtctacccagccctttatcgctgaaaagatatgctggattacatcctcatttctcagattaagcttgaccagatcatagtttccttcccagccctcgtaccacaatccatcattatagtttgaattgccatcgaacgctatacggtcaaaccagtttacatatggtgagctttctctgtttttaagcacatcctgaaatgcccagaagcctcttcccacatgattgaacacaccatccagcactacctttatgccgtccttgtgcagattgtcacaaacctgtgcgaagtcctcgtttgtgccaagccttgtgtctatttttgtataatcccttgtattatatccgtgtgtatcagattcaaacaccggtgaaaaatagattgcatctgccccaagctttttgatatgaggtatccagtcattcactttcaaaattctgtgctccaaaacaccatcattctcaaatggtgctccacagaagcctaacggataaatctgataaaatacactttcatatgcccacattattttgccctccttgatagttgtgtagtggttttgtacctgttatctgttatctattatacacaattatgtacttatatgctacatttttttgttactttttacctacattaagtattttgttaccttgtataattaaatttctaatagaaattcctgtagataacacatgcaataaccacatggataaagaaaataagcggcatcccctttacaaaataccaatgctttgtcttgtgcctgaaggcatacatcccagcccaggtaccggcgcttccgcccagcaggctgagcccaaataatgtcttctccgggatgcgccatgcgtgtgccttggccttacacttgtcaattcccatcgcagcaaagcctgctatattcataagaagcagataaatcagaaaaattttcatataaataatgctccattctattactccgcacataaatttataaatatataaacatatctgcatatattaataagtccacaaaaaacaatagcccagcctttaaaggccgggccataaattaattattaattcttagcttttttagaaaccttagccggtgcagccgcctgctttttaatggcgctcttgcccagataaagcttcatcacataccacagctctgtagcgatgcagattgaagaatatgttccgcaaagcacacctaccatgagtggtaatgagaactctctgattgatgtatgaccaaagataaagagtaacaataccataacaaatgtagtaagcgaagtattgatgcttcgtgaaagtgtctgtgtaagggactcgtttgctatatcagcaagctcatctgctgagtacttcttgataccgtgaaggttctcacggatacggtcaaagataacgattgtatcgttgactgagtaacctacgattgtaagtatacatgcaataaacgtactgccgactgagattctgataagtgcatatgctgtgactacaacaagcacatcatgtaccagcgcaaggatagcacttgaagcaaatctgatgtccttgaatctgaaccagatatataacagcatgaaaatacatgaaataataactgcctttacagcgtttgttctcatctcaccactgattgttgagctgatactctgagtctctatagttgatgcatcaacattaaaatccttctcaagaagagctgcgagatcctgtctctcatcgagtgaaagtgtacgtgtctttaatgtgacatcatggctgccctgaactgtagtaacctgcactgcactattgccaaggagctttgatactgaaggcacgatgtccttctcaacctctgcggctgtataatccttgccaaagtctgcagtggttgatgtaccacctacaaactcaagactgtagtttaatgcattgccgcttgtagcaccgaaataaatcatgccgccaatacctgcaagtataactacacctgagataacaaagtatttaactctgttctgtacaaatctgataacctttctcttctttgccttgccgtagaacttctcagctctgacaccgacaccgtaaaatgctcttgtaaggtattttgcaataaaaagagctgtaaacagtgacagaataattgaaatcataagtgtgtatgcaaagccctttactgtacctgaaccgagcaccataagcacaagtgctgcgataaaggttgtaacctgtccatcgaggatggctgaaagagccttcttgtagccctcatttactgcagcaagcactgatttgccacctgcgatttcctcacggatacgggcaaatacgataacgtttgcatctactgccataccgataccaaggatgatacccgcgatacccggcagtgtaagtgtaatctcaaaccagtaaataaacagtactgtaagcattgagtagagtgcaagtccgatagatgcaaccacaccgagtataccatagagcacaatcatgaatatcatgattaagataattccgataattgcagcctttactgcatttgtgagcgctgttccaccgagctgtgcgccaacaacatttgactctaactcctcgagctggaggttgatggctccgacacggataaatgttgcaaggcttgttgcctcgtcgtaatccttcattccgttgattacacagttaccatctgagataacggcgcttactgtaggaacgctgatgaaatgatcatcatagtatataccgattgactgtcctgcatcctttgccttctttgtggcatctgcccatgtgtcaatagccttatccttgagctttaatgaaacaacaggctccttggttgatgtagatgatgactggtcatactgggcgcttgcatcctttacatcgttaccatcgaggatgactgagccattggcctttaaggtgtcaatatcatagttgagcttgtagccgccctcaaccgatgtgtcctgtgtatagttggcatttccgtcactgtcatactgggcgatgaagtacagtgatcccggacttccaagatcctcgagtaccttgttagggtcgtcaacacccggaatctctacagtgatacggtcatccccgctcttgtatacagagtactctgttgtgtagctctctgcacgctcctcgagctttgcgatagtatcatttacatccttgtctgaaggattcttgtccttgatatggtaggtgattgaaacaccacctgagaggtcgagaccaagcttgatattctgataatccttatccttggtgctctcaccattagcagttgcctcctgcttttgctttgtgtcggtgattactgcagtggaataccagcccagcaagccgatacaaatgactgccacaaggataatcacccaactctttccttttttcattttcttataccttcctgtcattttgctaccatccatataggtatacagatggcaaatatattcgcacacgggtcacaaataccgctatccgtttcccgtgacaaattcaaattattgtgcatcatctgccatatcagcctctgctgccttaatcatgatagcgcactctatacgcttcttctgcagctcgcagcctaaatcataggcatcagtgattgtgccgtggaagttgtatgagttggcggcacagccaccgctgcaatagaatctggcaaaacagttgcgacatttttccttggcataaacattacagcacttaaactcatcctggatgtcagtggccttgatgccatcccagacattacccataaggaagtcctcattgcccacaaactggtggcatggatataaatctccccatggagtcactgccaggtactcagttcctgagccacaaccggaaagacgcttatatacacaaggtcctccctctaaatctatcataaaatggaagaaattgaagccgtttcctgccttgtttctctttaccatctctgctgcaagtctgtcgtactcatcaaagagcacaggtaaatcagaatccttaagtgcatactcatctgtaggctgtgccactacaggctcaaccgaaatctgcttgaaacctaaatcagccagatgaagcacatcctttgaaaaatcagtattgaaatgtgtgtatgtacctctcacatagtacttgtcctgatgtctgctctccgcaaacttctggaatttcggaacaataaggtcataactgccggcaccctttctgaaaggtctcatgcggtcatgaacctccttgcgtccgtcgatactaagaactacattgtccatctctttgttggcgaactccataatctcgtcatttaagagcacaccgtttgtagtgagtgtgaacctgaaatgcttgtcatgaagcttctcctgctgccttccatatgccacaagctgcttcaccacatcccagttcatgagaggctctcctccaaagaagtctacctctaagtttcttctgctgcctgaattggcaatcaggaaatcaagtgcctgttttcctgtctcgtagctcatgagagctcgtctgccgtgatactcgccctcctctgcaaaacaatatctgcaggcaaggttgcagtcgtgcgctatgtgaaggcaaagtgcctttacaactgtctggcgcttcttgaaatctatgatacgttctttgtatgtatcttctgtgaagagctcttcattatccttaagctcatttacttcctgtattgcttcttctatctccgtctgtggatacctgtccacaagcttttcaataatctccttagctgagttgtcctcaaacagctcaataacgtcatatgtgacatcatccaccacatggattgcgccactgttgacatctaagacaatattatagccgttgttcttgtactgatgaaccactacaatattcctctctttctatacacattttaaaattacactgcgaaaagagtgtgcacctatcagcgcacactctttaaatccgcttcacctatgactatttgtactgctcacaagtctggtttccaactgtacaagatgtcttgcaagctgactggcatgatgtctggcactcgccacatccgccctttttaactgtgttctgtaattttcttgtatttaatgtctttacgtgtttcatttttatctccttttcatttaacgatgtctgattgacacatcatatttgctctcaacattatatcacagcattatcaatatgaaaagtcctttttttagcgaaaaacaagcgctgaaaacattaccagaagaagtattatcaaaagctcgaaaatatttttggattcacctatatctatgaccactgttgctatcacatacgttatccagtatgctacgaccgtcaccctgataaaacgtctgcggtgaaagcagcatttgagcaaaaatccgcacacaagccccaccactatattgaccgccatggcaagtgcaaactttatccactccgccatgtcgacaaagcactgtactatagaaagtatgataaggcacaaaagcgccgtaagatgcataatacatattgttatcacaggacctttgatttttctccacataaaaacgccctccacacatcatatatatgtgcaaagggcggtaattattcatatatgaaattcattcgtgattacagctcacagttattaactgttctagggaatgggataacgtcacggatattgcccatgccggtaagatacattacgcatctctcaaagcccagtccaaagcctgcgtgtcttgcagagccgtattttcttaagtcaaggtagaacttgtagtcatcctctgaaagtccaagctcatttattctggcaagaagcttatcgtagtcatcctctctctggcttccaccgatgatttctccgattcccggtacaagacagtcaactgctgcaacggtctttccgtcgtcattcagcttcatgtagaaggcctttatctccttcggataatctgtgacaaatacagggcgcttgtaaatctgctctgtaaggtatctctcatgctctgtctgtaaatcacagccccatgataccttgtaatcaaacttgtcattgtgctttgaaaggatgtcgatagcctctgtgtatgtcacacgggcaaaatcattttcaacaacatttcttaatctgtcaaggagtcccttgtccacgaaattgttgaaaaatgccatctcctcaggtgcattttcaagcacatagctgataacatacttgagcatgctctctgcaagcatcatatcatcctcaaggtctgcaaaagcaatctcaggctcaatcatccagaactctgccgcatgacgtgtggtgtttgaattctccgcacggaaggtaggtccgaaggtgtagatattcttgaatgccatagcatatgtctcgccgtttaactgtcctgaaacagtaaggttggtaggcttattaaagaaatcctttgagaaatccacctttccttcctctgtcatagggagattgttcaaatcaagtgtggtcacctggaacatctctcctgcaccctcacagtcacttcctgtgataagcggtgtgtgcacgtacacaaaatccctctcctggaagaatttgtgaatagcatatgcgcagagtgagcgcaccctgaaaactgcctcaaaagtatttgtacgaggtcttaagtgtgagattgtacgaagatactcaaatgtatgtctcttcttctgcagaggataatccggtgtggatgccccctcaacagtcacctctgcggcttgaatctcaaatggctgctttgcatccggagtaagcacaagtgtacctcttacgataattgcagctccgacattgatcttgccaacctcatcatagttgtctaagccatttccgtatacaacctggattggctcaaaaaatgtaccatcgtttaccacgataaatccaaaattctttgaattacgattgcttctgacccatcctccgatagtcacctctttgtcagcgaatttgtccttgttgcggaaaatctcgcgtatgtttgtaagttccattatctaatcctccatttaagctgcctgcgcatcaccacaggcagcatatttatcgttattattcggcatccgcgctgccacttgaagtatccggcgctgcactgccatcctcaaatgtcacatttgctttctctgtgactgtatcaatagccttgtttacaaggtactggttcttaaggtatgtctttccctcatccttgtgtccgcttccaaaatacttgtatacctcagaagccttgctgaactgaccattgctggctgatacgatgtaatccacatagctgttgaaggcatcatcatccatcttgatattttccttctcagctataagcccaaagatgaactctgtctttatctggtctgtcagattctccttccacttctctgtggcctgatccactgtcatgttgtagttggactttaaatatttcttaagtgtctgtccatccttgacattttctttggtaaatgaagcaatatattcattgagtctggcctgtagatactcatcaggaatctcgactgtgctgttttcaatcatgtagctctttatcttgtccacctcagcgctgtagagctgctgcttcaaatctttctcaatctgtgtggtaagctgggcatttgttgtcactccggcctttccaaacactgtgttgacctgctcgtctgtcatatcagcaagtgcaacaggatctgctgagtaaatgccctttactgtatactcaaatgtaactgtctgtccgtttaggtcatcgttgccataatcctcagggaatgtcacgtcacccttaaccttgtcacccaccttggctccgattaaaggctttgtaaatccatcgataaatgatgaaccgccgacctggctgttgtttgtcacatcaagcatcacatctgtagctgagccaccatcaaatgctttgccatccttatatcctgtgtaatcaaccttgacataatcgccatctgcaactgtatcacgatctgtaacctgcttgtacgcatctgcaccatatgactgaagcacattggtcagatatttctgctttgctgtatcgtttatctcataatcgtttgagactgtaattgcaatacctgaatagtctgcaagctttgtaacctgctttgcgtagtctatgtcaaactgtccgcttcgcatcgtctcgctgccggcctcggtgcctgcctctgttgcgctctttgagccaccctttttgctcttgccgcttatcacagcaacaagcgcaataattaccacgataagtgcaatcacaatcactgctatgactgccttcttacctgtattctttttctcactcattggaatcctcctgaaatctgtaagtcatgttatttatatgtacaatgccctgccacggcaaaaacgcatccgcaaaacactatacctgtctacaatatcacatatcaggttaaattacaacgagtgaaaatttctttatctttgcaaacaccggaggagtatgcatcctaagccctactgtcaccctggcattcttttgcagccttaccggcttaagcagatgtgtcacaaacctgatatcatcggggaaaatgtcgcttgtatatgtatgaacgccgctttcatcctccacatccataaacagctcgacctcgacacctgttgtattggttcctctatagtcaaccgctgctatatactcaccggtatattcaatatccaccgtctggcttatcgaatagtcaaaattggcatctgaagagataaacactccatccttacccagtgtatactgtctttcttcgaggcttgtctcaatctgccaattattaaatccatccttaaattcaggatttgagattagatttccatgaatcataagaagcttcatgaaatcctccacctccggtgtttcttcatactcataaagtgattcaatatacttgtcaagctctttaatcggcggatttttcggatcaaagtccctgattgcatcccagcccggcaaagccctgccatgctcgtcaaacatacccatattctcaaaccaggttcccatgcctttaccaggcacaccgacaggctcccagtagtatacacctgtctttccggtatcctttgacacctctgctgctatctgcatgattatttcaagagacttcttctgctctgcgctgcctgcatcaagacctgcagtctccatgagttccttcgagatatgatctcccttgcaatgcctccacggatgagctgtctccacaatataaaccggcagattatataattttataagcctgctcatagtatccttcaaatccatgaaggtaccatgccagaacgaataaaaggaaaggccaatcgcgtcaatcggcagcatgcccgcattaaacatagaatcaaaccaaggcataatacagttatatctgcctccctgatccagatgaatcatgacctttgtctccgggagcagctccctgacagctctgattccctcatttacaagcgcagccagctgcctgtactgtggcactgcaccatccggaaacagcataccactccttatttcattgccaatctgaaccatatccggcgcacaatccatgatttttaatctgtatagcacatcatatgtgtacttgtgcactgcctccttcagctcatcaaagcttaaattcttccacgcatcaggcttattctgctgtcccggatctgcccagtaatctgaataatgaaaatcaagcagaaaatgcattttgtattttttaatgacatgagccatctcgagaacatatgtaagactgcaataccccttagactccggcaccttatcaggctcattccatatgcgcagacggactgaatttacattattcagctttaaaaaatcaaataccctgcacacatgaccttccctgtccattatttgtatattattgtcaaccatcataggaacggatgaaatatccactccctttaagaaattgctatcctttttctgcttgtgctgctgcttaagctgatacatctttgtgtcagcacttacgagataatcgtcaaaactcttaccactgcccggcctcgtatatatgatgccgtgactgataaacaggctgtgctgctccatgatatcatacacgcgctttatatacttctcagcagtgtcatgtctgtccccagggataaacacgataaattcatctccaccgaatctatataccatacttccctcaggcttttgctcatcaagcaccctcgccacagtctttaaaagctcgtcaccgtactggtgtccgtaggtatcatttatgtccttgaaatcatccacatcgagaaatactatggtgcagccgacattttgagcttcaagctcagcaaacataggaatgaccatctcattgcatgccacacgattgtataggcctgtgagcgcatcatggttgtagagattcttaagctcattatttgtattctcaagtaccttttgcttaaaaagattctcaagcctcttgagcagggcagactgtatatcaaactgctcaggatggtcgtacaaaaactcaggattcctgagtattacatagcccactatctcgtccctgaaatgcagcgaacaatacatatagcaggtgtttttatctacactctgcatgtactgcataaggtcatttacactcttaaactcaagctttccattgtccttgtcatccgcatagagtacaacctcgtcgtcaatatcatagccatgcttcctaaagtgtgcattgttccttgcagctgccagatcagaaacaccgaccacatacactccgtcacacttcatgctctgtatatagtcagagtatctctcaaacaaatcatagtattcattgcactcctcgagctctttctggaggatcattactgcatcctcctcctgctctcttgcaacggagcctttgataatattctttatgtaattacgataatccactctgccggtattagggcatccgcagctctcagccggtataaactcagaatcaaggtatttatcagaagcatcgcccgtgccattccaaagcgccttaaatatctcaagagcatttctgcctatattgcccctgttgttatccactgttgtaatctgtgggttaaaatacgcagccttatccagattgtcaaagcctgtgaccttaaaatcctgtggtaccttgtatccaagaacctctgctgtcgcacacagtcctgctgctatattgtcatttgcacataaaaagacatccggtaacggctttttgctctcgtgccaatcactcatatacctgacacctgtctgataatcaaaatcaccaaacatgtacatatcagctgtaagtggtatgccataatcacttaaagcctccttgaaggcctcaaaacgcattctgttctcataatgatacggcggaccacctgcaaacacaaagcttttgcagccatgcgcatagtacatatgatccattaccttgcgaaacagcctcttattatcgttgcctacatagtaaaacccatcaaccttatacccgatactcactaccggcacatttaccgactgaagctttctgaccatatactgtatctcatccaggttggtcgtattggtgcagtcaaataccactccgtcgaagctgtttaaatcaggcaaatcgttcagcgcatattcgcctttgttaaactttgaatcctgactccaggttccgttggtgttgtaaaaatacaggcacacatccagtcccagctctttagagcctcccatgataccctcaacccacgaatatattacatatcttctccagccatcagccaaaagagcaattttcttcattaataaatacccctttgcgtcttctaaagaccttttccaaaatatagttctagtatactacggttttacctattcttgcaataaagattgattttttttagcatatttgatagaattaatttaaataagcaaatttttaggagggatacgttttgaatccagcattaatcgtacttattgttatcgcagtagtgcttgtggtagcatttatagtattaacaatcctcggtaaaaaagcacaaaaaagaaaggaagagcaggacgaacagatagctgctgcatcacagacagtcaatatgctaatcattgacaaaaagcgtatgaagctaaaggatgccggtctcccacagcagattattgagcagacaccaaagcttatgcgccgctcaaagcttcctgtagtcaaggccaaggtcggaccaagagtcatgtctcttatcgcagacgagcagatctttgatgagattcctttaaagaaagaggttaaggcttctgtcagcggtatctacatcacagctgtccgcggtatcagaggacctcttgagaagcctaagaagaagaaaggcttccgtgcaagaatggcagaaaactacagcaaggccaacgaacagctcaaggctgaggaggctgcaaaggctgaaagaaaagctgctaaagaggctgccaaaaaggctaagcagaaataatatcatgatttaattttcatgtacataaacagagcatgtgggatggctttcatcctcacatgctctgttttttatatgctttatatattttttaccccataggcttggcagacttttatgcaattttgactgctgcgccttttttcttcacagctatattgatgtgacagtcgcctacaaattcatagttgacatcaagtgcatactttacctctgcccttatctcgtcctcagtctcctttacctctatgcttgtggcatcaatacctatctggatacttccaaacggtgtataataatatgtcaggtttttctttcccttctcaaatatcatatgtacactcataggtcccttgcgggtgaactcaagataattgtcattgaatttaagcatatttttgagtgtctgggtctcaccctccattatctcctcaaaaagcacatagtgcttgttatttcttatataatactctcccggggcaatcacctctaccgcatccgactgttggtccggtgcgagctgcaggccctttaatgatactactacatcctttgtcatttttttctccttatcctcttgcatatctaaattaattcacgctttaataatttgtcatcacatattttcttttaatatattttttcagcatgaatatactaactgttttatctgaaaatatcaaggatttttagttttatttcatattttccactgtcaaatatgctctcatactcgtccggagtgagtacctccttaagattttcctttgcttcatcctccaccacctcgtacacactgcccctaaagcacatgtttggatacagcacgcaccaccagttatgaccggctccatcgcccagtgttatttcaagcgcctcgtaatttccctcaggaaatgtatagtccccatacgtcttttccgggaaatcggtgtgtgtaagctctgccgatgcgccatatgtaaaaccgtttgctgcaagcgtctcctttgataccgctattatttcgtccatatggtcatttacggtggctctggtttcttcgatattttcgcactccagcagatatggctctatgtaagcccctactgcatcgcgcacctgctttttcacattctggtctgcttcgctgtcgctgtttgccagcacgtgaaaacgcaggattttgccggcgatggatttttgcatgtcggctgtacacgctatactattggtgtttgcggcaggtgtatgattttttgcagctatcgctgccgtaagggatattattgctatggttgttattattattttctttctcatgtaaacaagtattgccttatttgacgaacttattcatcatttttgaaaattttaccgggtttcatgaatttcattcgtatagtcatccagcaaggtgccaagtgtaattatcggttcaccatcctcatgattctccttattcattttctgctcataataatcacccatgttatcaaagatatcatttatatcatctgctatgcacacatatgtgtttctcggaaatttttttgatgtcttgcagtattccatgaagtctgaataagctgctttatcatttctaagcgtttttcctattaatatcaccttcaaatgattggtatcggctttttgtgacagccgatcctcgaagctgtccacggctgttttgatatcatatgcatattccggttcgtaggatttgtccatgttatagtagaactctatatatccgctattttcatttgccgaaacatctctgtggctaacatatgctttgttatcagttacttctttatcggttatttcgtcagtatatacatctacaatatccaccgccgcaagtgtcggaaaacagcgctcctcaagttccactgcactgcagccggtgagcatgagacctatcgtcagcactactatgaccggtatcgctatgcacattaaaaatccaagatattttttcacgatttcatctccactttcaagaatatatgctaaggtcactgtgactgctatgacaaaaatgatgcaccagcttctcatagtgctcttttccttgtcatggcttttctgtctgtcagagccaaattgcttattgctacaggaatgccggtttttattaaatgtaaatataatttttctcgtattttcagcaaaattctcacatcttaaaaccgcataataaaggctcatattgagtactgaaaacagcgtgaaaaaccacaccgacagcatcagtgcatctgccctcttgaagaagctgccttttatctgcacatcactcatcagtacgacagccggaaactctatttccgacagtgaatattttccaaagtttccaagcaatactgcatacaataaaaaaagaatgcctgcatatgtgaatattgctttactcacactcccttgtatctgtgaggcagtgcgctcccttacaaacagtatattgaacacggaaatggatgctgcaaacacatagtatgcgcccgcaaatatatccgctatgccaaagtccacaccgactctgtccttaatcatcagatagtctaatctcatatccgatagcgcaaacaaaagcatagcggcaagcggtatcagcacaaagaaaaatactacctcgtataccctggcacggcactccactccgccacttagcgcataagcgcataccgccattatcacaagaagtacaactgtaaatgactcatccggtataaggctgtcacgtatcagctttacaaatatccatgcaagaaatgcggcctgtgacagctcgtatattgcaataattaaatcataaattaatatttttgcatgtgctgttttaccaaagcttctgtcatatatacttttcttctgatctcgtacctcgcttactatccacataaacagccatgccatgaaaacaccaagtgcgattgagataaaagcatactttccaagcttcgccagattgtttggaagcaccagtgtgccgactccaagcagattaaagacgtatagcctgtatagctggcggggcgatatgctttcgttttgtgcaaatgtatctcttttacccatatttatagccatactttaattcctttcaaagtaaagtatggctataaaatacaattaatatacaattcttaatctatcatttttatcctggtatcccctattcctcttttatgtcaatattctgcaccttatcctcacttatgaatatctttgcatttggaaatgccttacacaggctttctacctcagtttcatcttttgacaaaggggtatcatatatgcatatcgtttccagattctttagcgattttagatcatctgcatcttttatattgctaccccataagtatatttcttttacctttgaacaatttttgagaaaaccgaaatcactaactgtactatcgtaaatcttaataactttcatattgcagcattttgctaaaaaatcaaaatttgaaatattacagttttccaaataatttgaaaaagaaaaaatttctattcttttcaaacttgggactatatctgataattctttttgatacttttgtgcctgctcatataataaaaaatcaatgtcttcctctttttttaatggcttccatttatcgcctccaccatttattgttaatatcctcaaatttttacaaagttttatatcttctaaagtatcatactttcctggaaaacctatattcaattcctttatagcatatacatctttatattttacattctctggattaacgtttggtccaattgttctgcttatctcatatgccatgtcggagtctttaaattttacatgacgattcattctcacataatatagtgcaaaacatatcataaaaaaaatcactaaactaaaacaacaaataccaaccttatttttttttattttttgttccataacctctctccctttcgcgcaaattcatacataatatacatgttatcatttgtattgtttaattacaataatgcaattttaccattttcatcaacttattttgtccgattttctttcagcttcctgcactccttttctcttgcaaacacaggccgtctccacagtctgcgaagcggaaatcgtatgatactgtccttttcatcctcgcctcctgtcagctcgctgcccacgaatggcatcatgtatgggtaaccacagcttttgagctttgcgagatgcaaaagtatcaccatcagacttattaaaaatccaaaatatccaagccatgccgacatcattattacagcgaatttgagtatcctaaatgaaaatgcaaactcctcactcggtatggcaaacgagcagagtgcggtgaatgcaaccaggatgaccactatagggctcactaaatttgcatccactgctgcctgtccgattatgaggcctccgactatgcctatcgtatttcccatggctccgggaagtcttatgccggcttcgcgaagcagttcaaaggacagctccatcatgagcacctctatgagctgtggaaacgggcagccgagtcttgcttcataaaacgccagtatgagtggtgtcggcagtatctgtgtatgaaaatttgtgaccgccagataaagccccggcaatgtaaatgacataaaggctgccacgtaccttatcaatctggcaaagcttgccgctatcgttctgttatagtaatcatctgcggtttttaaaaaattgttcatggtggttggcagtattattgctatcggtgaattatcgcacagcaccaccaccctcccctctaggagcgcatttaccgccacatccggccgctttgtggtctgaagctgtgggaacggtgaataccattttgcctcagcaaactgttcaagaactcccgagtcacccacatggtctatcacatagctgtccagattcttttccacttcctctacaagccccggttttacgaggtctctcacatatagtatgtccacattgctgtgtcctcgaagtccctttttcacctctttacactttaagcgtgtgctccttaacctgcgcctgataagtgcagtatttatctttattgaatcagcaaagccctcattggagcctcttatgaccttttcagaatcaatctcctgaattgacatggcgggatatcccttgtctggaagcttgaaggcatccggatagccatccaccaaaaaaatcacgtctcctgtcagcatcatctgggctgcctcattaaccgtgtgcagatgtgcaaattcggatagagctgcctgatttttgtcaagtacttccttaacctgatcccggtctatcccttcaaggtatgatgtaaatcgtccaaacgcactgttattgataccggagcctgcacatgtcacctcaatatatgcaacaaaacactttatggaagcatcacgccccagatacatctcctgcatcttgatatctgagcagtcagaatatatctgcctgaagctttttatgttctcatctatgtttgtggtcatctttaactctcctatatacccaataaatcccgtaagatttaaaatccctgatatagtatgaccatacaagcccgcaaatatccctgattacttattttttgctattatctaagccactaactaagccactaaaaaaaggccgccgttcacacgtcagtgcaaccggcagcccctggttttgttatattattttgtattttattatctttgtctgctataatcttgttatatttctgttttatttcttctcttcatcctgcttttgtatcacagccttcacagcaaccgcctgattggccacatgcgtatgcatttctgtagtcacaagctccatatttcttgactcaagcgccctgtagatggcgtcatgctccttcacaagcatcggataattctttgggtccttcaaatactccactctgtagcggtacatctgctcgcggatattgttcatcatagatacaagcttcgcattgttggtcgcctcatagatagcatcgtgaaacttcacatcctcctcagctatctttttcacatctcctgagtccatgctcctcttgaactcgtcctttatagtttttagattcgcaagctgctcatcactgattttcttacaggctattttggctgcaagctcatcaagagcctctctcacctcaagcacatcctccatatccttgagagtcatcttggcaacctctgcgccctttctcggcattgtgactgcaagcccctcctgctcaagcattctgattgcttcacgtataggtgtacggctgactccaagctttgacgcaagctgcagctccataagtctctctcccggcttgagctcaccctttaaaattgcctcacgaagtgtgttaaacaccacatcacgcagtggcagatatgcatccatatttaaagttaaattatcagtcatcaaacttctcctatctcttgtattataattctcacatataagaaaaaagtaactataaagcacccgctgtgctatccggatatcacgttatttgcgattattgtatacagatgtcagatacacctgtctggcaagatgtgagcttctcatggctttgtacgctttctttgcagtatcttcatcgtcaaacagaccaaaaaccgtcggaccactaccgctcatcatggctcctaccgcgccatttgaaagcatatgcttctttatctcatctatcaccggataatttggtatggtcacagtctctaagacatttcccatatgcgctgcgatatcatgcagattcttagcctttatatcatctatcaggcggtctatatccggatgaatagtcgtatcatcaagcttcagattctggtacacaaactttgtggataccgagatggacggctttgcaataagcaccggacactttaccattggaggaagaggactaagcgcctctcctatgccctcggccaacgccgtgcctctcataatacagtatggtacatccgcacctatctgcacacctctttccataagctgtctctttgtcagtcccagtgaaaaaagccggtttacacctataagcatagctgccgcatcagtactgccccccgccatccctgctgcaacaggaatacgcttgtccagcttcactgatacaccgtcagttatagaaaactcatccatcagaagctttgcagccttgtatatgagattgttctcgtttacagggagaaaagacagattggtctgtatctgtatgccaggctcctttgtccttttgatatcaagcctgtcatacagatgaatggtctgcataatcatacgaacctcatgatatccgtcctctctgcgcctcacaacatcgagccccagattaatcttggctaatgcttttaatgaaatatcgttattactacccatattgtattacctctgttttttgtatacaaagattataacacaccccttcaaaaagagcaaatttaaatattctcatttaattgttcattttcattacttttcagattttccacgtatcgcacaaaaaactatgttcacatagtacatgtttactagatttaaaaagtaaccctctaacgcaccacaacaaaaagcctcacagcacatatcaataatgcttgtggggctttttttaaaaagtttttctaaactcgtatgtacaatttttctatttcttttccaatataaatttgctaatcagctcgttcattgtctccgcctgtgctgaaagctcctcacttgttgctgatgtttcctctgcatttgctgagtttgactgtacaacatctgatatctgattaatgccagcctctgcctgctccatagcctttgcctgctcctctgcaatctcgctgagtttttgagaagaatctgcaacttccttcataccattaataaccttttcaatagaagtacttacgcgctctgcagcttcattaccctcgttagataccgcaatggcactctctataagctgacgtgtgtcaactgcagccttggcactctgctctgaaagacttctgatttgtcccgcaacaactgcgaatcctttacctgcctcacctgcacgcgctgcctcgatagctgcattgagtgaaagaaggtttgtctgactggcaatatcctcaatctcagaaatgatattctcaatctgcttagatgtatcattgatgcgtccgataacatcaaccatgccctgcatctctgtatggctgtgatctgcttcctcagcatactcctgtgcaatcctgtatgtatcattgagcttctcagatgttttctcaacaccgcctgtgatatctgcaaatgtagcctgaagctcctcaatggctgctgactgatccatagcaccttctgcgatttcctgtgctgcctgagcaaggttgttagaacctgctgtaacaagtgatgatatctcattgatatgtgacataacatcattcatctgtgtcttcatctgacgcattgccatgagaagtccaataaaatctccggtatatttatcttccatgtctgatgaaactgtataatctccttctgccatctttccaagaagcttgtcagagtcagatatgatagtcttaaggtctgctgccatgtttttcgcaacctctaccatatcagcaatttcatcttgtgaatcaactgccgggaatggagcctcaagatcaccctgtgcaaatgtacgtaatctctgttttaactcatcgagtggtttagaaataccaactgcaacttcgtccccgattttcatcgagataaaatatgaactgacaatgataacaataacaataccaaatgcggcatatgatactaatgataatctcttgcttaaattatctccctctgttacctttatatccataagggcaacaagctgctgatatatctcatcatatgcaggtgcaagatctgctactgctctctcctcggcttccttctgtgtctcaggatctgtagcattcctacctaactgtccgatttcatcatcgagactccagtatgaatcgagcttactgtttatatcatcatatatatcctgctcctcacctgtctttatagagctttgcagctctttccagtatttttgaaatgattcctttttagaatcatgtgtatcagacatcttacttaatgtgtcagaagctgtataaccgataagagctcgtgtagcgcttcgtgtctctgagaaggttaccataacctttcctatatctccctgtgaaaatccgtaaaaggttagtgcgctggaatatctcattgatacaagaatcataagaatacccgcgataacccccgatgccgatgctacaaatgtagtcagtctgaagcctttctttaaacgatttttgatgctaagtgctttccactttgacatgtctaatttcatgatatttcctccacatgaataatgatacttatatactattcttctattatacacctctcaaaaaattatacaatcgagtaggaggcggtgactaaccgccgtcctctcacagcaccgtacgtaccgttcggtatacggcgctttcaatagttaacgtgcacagactgataggctgtggctaaatcataaaagccactgtttatcagtctttctttattcagcgcccaaatcacagctttgttattgctgatataccaatactttctgcgactgtttgctattgttgacgcatagtgttctgggattccaagtttgactagatttttatatttcgttctaggtttcttccactgtttccatatgcacatgcgtattctgtgatagagccatccgttgatgtcatctatgttgctcttcatgcttgcaattccgtagtagttaagccatccccttgcatacaccttgattttctcaaggcttggcttgattgactgacatcgcttacgggaagataactccttcaatctggacttaaacttcttccatgacttcggatgaactcggacataagtgcctttcccgttccttcccaatgcaaagccaaggaatttaaaatttcggattgcaaacacgctgacagtacggctcttttctcggttgactgtaagtttcagcctcttctcaagatattttgtactgctttccaagagtctctctgatgctcgtccgctctttgcaagaagcacgatgtcatctgcatatcttatgcatggaacacctcttttcaggaactcctggtcgaactcattgaggtagacatttgccagcaatggtgatagatttccaccttgtggtgagccttcctctgtgtcaatgaccactccgttttccattacaccgcttttcagatagcgctttatcaactgtactacacgttcatcttttacattcttccggagaagattgatgagaatttcgtgattaagagtatcgaagtactttgacaagtcaaggactacagcgaatgtatagccttgttctgcatactccttaaccttaagtattgcatcttttgcacttctgttcggacgatagccatagctaccatctgcaaacagcggttcatagattggcactaactgttgggttattgcctgttgaagtgtacggtctatcactgttggtatgccaagctttcgcacaccaccatctggtttgggaatttcaactcgtcttactggagacggagtatactttccacgataaatgcggtcagttatctcttgttgatgttcctttagatatggaagagcctcttcaatggtcatgccatcaattcccggcgctcccttgtttgccttaactctcttatacgctctgttaaagttgtctttatacagtatcgtttccaaaagtctcggctgtgcactgtctctttctttccatatccgattgaatgacctggacgctttcacatacccttcatgttccgcattatctctttgcgaacagccattgttttcaatgttttctgccatagacggtcattcctcctttctcggtcatactcaagactcctactgattcggtccttcacctctcggctactatgacctctgctgacttctatgcgttcagcattgctttatgcaatggttacctctttcaaggcataccgcacagacctccctaggtaccacacgtttcttcctctccatccatctgcctcatttatcatgcatgattccgtgtagttattgggctttaacatgggttgctgtcttacccacatgcatgacctcatatgagatttctgttcgtcagaccagagatttgcccgtgagttggtatattcctcacatccagcttccttcagattccatctcacgatggacacccttgccttcggctatatccttcccactaccgggcggattcgggactttaacccgttagaaacgtgcgccgctaggcgcacagcactaaaaaggtgactgcacgctgcgtgcagcccccttttcataattcataaatcagatttcttatataatattcgttccatcacgacacttttacatacacatccagcttctagccctgtacctgtgtgtcctctgtgccattcttccagtcatcaaacttcttgactacggcatcataagtatcctggcaaattgatggcagcttgtctccccaggctcctgttgcctgtgaaaagcccttcttgaatgcattcaaaagctcatcagccttgtccttgtcgcctcccgacagtgcctttgcaaagtcaagaatacggtctgaggtcttctcaactccccagtatccatcctctgcgatgtcctttttggcctgcgctattgtgtctgcatctacagtcagattctcaaacagactctttaagccctgtgacttgtcccaggttgaagcctgtcccgtcatggactttctgacgatctcgataagctgctgctgtctggcgttggcatcatccttaagtgcctgtaccagtgcatctctgtctgccttgctcatcttctggtttactgtgctctttgcagtatcctttgaatcatccttgctgtctgatttctcatatacagctgcctcctcgctgaagcctgcagtctttgcatccgacttatccggctttgcatcctgcttctttgaagcggtattggtattctttgtctgcgcctcgtcctttgctgtgacactctgcgccgctactgctgaaactacacttgaaatagcatctaacatctctcatccctccctggtaatgtgcgtgcgggaatcctttcccgctatactattatcaacctgtatagcgtctgatatagctaaacagtctttctcttatattgtgtatcggctgttttgtatctgtttcttatagcccttgccgttattttttcaattttctgccaaatataaatgtcgaaaaatatattaccgatgcaataatcactatcatcggacctgttgccacattggtgtagtatgacactgcgaggccgactataccggaaaatactgaaaatatcactgaaaagaaatgatactcacgcatattttccgaaatattccttgatgaagccgccggtaatataagcagagcatttattataagtatacctatccacttgatggatagcataactatgagtgctacaagcaccgcaaacagattatccagaagacgcacatggatacccttgctttttgccacgcttctgtgtatacatatggcgttgagcttattgaagcaaagcacccagaacactatcgtgaccacaaaaatcacaattaaataaactatctcagtctttgtgatgcttagcacatcgcccaccagtatacttgagtatttgctgaaattgccgccctttgacagtatcgcaagacctatcgccacagagcacgatgaaaataccgatataatggtatctgtcgatgcagtgttcagactgcctatcttatttaaaagaagtgcaaacactatcgcaaatatcaccatagcaagtgaggtatcagccatgccgcataccactccgacagcgattccggtaagtgctgaatgtccgagtgcatctgaaaagtatgccatctttttgtttacaatcatggttcccattatgccaaaaagcggtgtgatgataagcacagcgataagggcatttctcatgaaatcatattgaagccatgaggttatattcatttgtgctcctcctctctcacccaggattcctctcctgtgtaaaaaattctctcaaattccctgctctcgaagacttccttcacagtcccctgctttgctactgtcttatcaagcagtacaacatggtctgcgtactttgccacatagtccaaatcatgtgatatcagtatgattgcaaggtcatagtgagtctttaaataatccatggtcttatagaaaagctccatgccgttttggtctattccggacaccggctcatccaacagcagcaggttcggctcgtccattattgccatggaaagaagcactctctgcagctgtcctcccgagaggttgcacacctgcttgtcgatgagctcctcagcctcaaatacctcgagtgtctcccttatctttgcctctatctttttgctctttggcaaaaaaacaggataattgtactgatagcttgctatgaggtcatacacgctgaccggtgtatttttctcgatattgacagactgcggcacatagccgattttaagcttagccatatgtccgtccttagtatccttgaactcaatcgtaccggtgtgaggtatctcgcccagtatcgcctttatgagtgtagattttccggcaccgttctggcctattatgacattgaaggagccacagtgtatgtgcatatttacatcctcaagcactgtctgctctccaaagctcactccaaggttatttatttttatgcaatgaaagccacatggctgtattattttccgcatattttctccaattttatttagtaaatgcctctttgataagctctatattgtgctccataccatcaagatagctgtccttgtcgtactctcccctgttgagagggtcgatataaatcacatgcacatctgtctcacgcgatacggtatctcccatgctctttccgtagagctcctcagcgagtattaccgacactccgtcatcctttatggcacctattacctgctttatctcacctgcgctgactgagcgctcctcgtcaaggtctaacagatagcatgcattcatggaaaaatcatcagctacatatgcataggcctcatggaatatgatgatattctgtccattggtaagactctttatgctatttatcttttcttcaagcactgcaagctttgcatcatatgcttttgcatttgcataatattcatcagcatgctttgcatccttttcggcaagccgggatgcgattgtctgaaccatggtgcggtaacgcggcacgctcatccatgcatgggcattctcatcaccatggtcatgatcgtgcgcgctatctgattctgcgtctgcttcgtggtcactgtccgattctgtgtctgcttcgtgatcatggtcgtggtcactgtctgcatcatcctcagaaagaagtgccacatcctcacaggcctcaaccacatcaagcttcggatacgcctttgccacatctgacataaacgactctataccgcctccgtttattacaaaaacatcggctgtggataaaagcttcatatcctccggtgtgagctggaaatcatgcagacaaccggtctgtggctcgcttaggttttcgagtctcactcctttcacaccatccactatgtttaaagtggcaatgtacataggatagaaggatgtcacgacagtaagcatatcgtctgcttcgtcagtattttttgtattgcccgaagcatttgatgctccaccggcagcgcctttcatacctgctgtgtgctcatatgccattaccgcaagcgtacacactatcaatatacacaaaaacataatgcctacaaatttgcatttattcttcatatattaaatattcgcctttctttctataactttatttctttttatgattattaacgctttttttgctcttggccttatctctgcgttctttagtctttttggcaaccggctttccggtcttcttccagcgctcctttttgtgcggctgggatgcagcggctctttttgcagctgattttgcctcgcgctttgcttcttcctcctgtttcatggcaagaagcgtctcctcgtcaaatacgagtgaatctatgagattccagatttcgtccctgccttcctttgacatggacgaaaacggtataactaccgtgcccggctttacatgaagcacatccttgatagtctttatgtgtgcggcaatctggctttttttcaatttatcagatttggttgcaatgatgatcggtgcaaagccctggtttaccatccagtcatacatcatgatatcattgtccgatggctcatgccttatatctattaaaagaaacactgcctgaagcttttttgaggtgtgaagatagttttctatcatctgtccccatttagcttttatctcgatattggcattggcatagccatagcccggcagatcgaccagatacatggcgtcattgacgttataaaaattgatggtctgcgtcttgccgggctgtgaagagatcctggcaagtgactttctattcatgagcgcattgatcagtgacgacttgcctacatttgacttgccggcgaatgccacctcattatactcattgtcagggattgtgcttgtaattccgcaaactgtctctaaattaacacttttaattaccataatctcttcctcattcttattttacaaatgctatcttctccacctgtgaaaatctctccaccggcacgatttccatgccgtctgttatttcttttgaaatctcctccaggtccttttcattatcctttggaatacacactgtttttattccgattactttggctgcaagcagcttttccttgagtcctcctatcggaagcaccctgccgcgcagtgttatctcgcccgtcatggctacatctgccctgacaggtctgtctgtaatggctgagagcatggctgtcgccatagtgatacctgcagatggtccgtcctttggcactgcgccctccgggatatgtatatggatatcatgcttcgtgtaaaactctgcatcaatgccatatccttcgcttattgagcgcacatagctaagtgccgcctgtgccgactccttcatcacgtcgccaagcttaccggtgagcactagctcacccttgcccggcagcacattcacctcaacctcgagtgtgactccgcccacgctggtccatgccaggcctctaacgattcccacctcagcgtgatcatttttcttctccggactgtacttcggattgcccagatacgtcttaagattggtctttgtaacctttacagcagcttcgctgtccttaaagatttccctggcagccttgcggcacagcttgccaatagtcctctcaaggcttctgactccggcctctctggtgtacagccttataatatcctttagggcagagtctgttatcgtaagctgttcctttttaattccgtttttgctcttttgcttctcaaccaggtgttcctttgctatgtgaaacttctcattttcagtgtagcttgacacctcaataagctccatcctgtcaagaagcggctttggaatgcctgaaacctcatttgccgttgcaataaaaagcacctccgacaaatccacaggcatctcgatgtaatgatccctgaatctgcagttctgctcactgtcaagcacctcgagaagagcggctgatgtgtcacccttgtagtcacttgacaccttatctatctcatccaacagcatgagaggatttgaaacgcctgcctgtcttaagccatttactatacggcccggcatagcaccgatatatgtctttctgtgtccacggatttctgcctcatcacgcacaccaccaagagaaatacgcacatatttcttctccagtgcagacgcaattgaacgggctatgcttgtctttcctgttcccggaggacctacaagacaaattataggactctctcccttgcttgtcagatttctgactgccagaaactcaagtattctctccttaacatcctttaatccgtagtgatcatcatcgagcacctgtgctgcatggtcaagatccttgttgtccacagacatcttgttccacggaagctcaagtacagtctctatatagcctctctcaactgtgctctctgatgagctgctgctcatatttctaaagcgctttatctcttttttcgtcttttcctttacgtagtcaggcgcatctaactcagatagctttttctcatattcatcagcctccgagtcagcattctcgcccagctcctcacgtatcacaccaagctgttcacgaagcacatactccttctgatgcttgtccacacgaacctttacttttttctgaagctcattctttatggaaataacctccacctgggagagaagtaatgatactataacctgatatctgtcattgatatcctctgcctcaagcacctgctgcttaagctcatatgacaccggcagattgttggttacataatcaatgagcttttcaagatcctcatactgatctatctgcctgataagctccttgctgattttgccgacgactgccgcatatctgtgaaaagcctctctgactccgagaagcatggcttccctgagatcctccggcaggctgtctgcattactatcacaataacagatttctgcctcaaggtacttctcattaccggtaaagccaagcaatgctgcccggcttattccatctacaagtattctcacaacatcattctgtaatctgacaacctgctttatatcagcaacaatacccatctgatagagatcttcctgagtcgggtcctcactgtccacattcctttgtgtgacaagataaatcttttgatcctgctccatagcctcctcgacagcacgaagggagcgctctctgctgatgtcgaaatgggcaatcatccccggcagaatagtaagccctctcagcgctactgcaggcatattcataatctgttcttccacttatatctcctgtattattgcacagccatgcataacaaaccgctgtgcaatttatattatccgatgctgtatcttttgtaaaataccgccatgtacttacgatgccgctttttcctcgatatatgcctccggcacacactcaccatcgagctttaagttttcctcaactgtatccttgtcgattacacacttgctgatgctcttgtctgatggtatacgatacataaggtcaagcataacagcctccatgattgcacgaagtcctctggctcctgtctttctctcaagcgccttgtcagcgatggcattgactgcatcgtctgtgaactcaagccctactccgtcaagctcaaagagcttggtgtactgcttgataagcgagttcttaggctccttaagtatacggataagtgcatccctgtcgagtgcctcgagagaaacggtaataggtacacgtccgataaactcaggaatcaatccaaactttacaaaatcctgtggaagtgcatgcttaaacgcctctcctacattgagctctgtctttgactttacatctgaattgaagcctatagatgatgtatccatacgactgtcgataattttttccagaccatcaaatgctccaccgcagataaaaagtatattagtagtatcaataggtataagctcctgctgtggatgctttctgccgccctgtggcggtacagatgcctctgtgccctcaagaatctttaaaagagcctgctgtacaccctcgcctgacacatctctggtgattgagacattctctgatttctttgtaattttatctatctcatctatataaatgatcccatgctctgcacgctcgatatcataatctgccgcctgaataagctttaacaggatattctccacatcctcacctacgtatcctgcctctgtaagtgttgtagcatcagcgatagcaaatggaacatttatcactctggcaagtgtctgcgcaagaagtgtctttcctgaacctgtaggtccaagcatgagaatattactcttctgaagctctacatctgatgtatcacctgccagtactctcttatagtgattgtaaacagcaaccgaaagcaccttctttgcctggtcctgtcctattacataatcgtccagaaacgccttaagctcctccggagtaacaagatttatatcatccttagcgctgcttttgtcctcatgcccctctacgccttcttcctcaagaatctcggcacatatatctatacactcatcgcagataaaagctccattaggtccggaaatcaaacgatttacctggtcctgtgtcttaccgcaaaatgagcagcgaatctttccgtcgttttttcctgccattattaactccttttattgcatgagggcatcccatatggggtaccctcttaaattcatctaacttctgattatctgtttgttattacactgtctatgagaccatactctgcggcttcctgtgctgacatatagttgtctcgctctgtatcagctgcaattgtctcgtatggcttgcctgtattggctgctaaaatttcgtttaatctcttctttgtctttaaaatattttctgcagcaatctgaatctcagtagcctgaccctttgcaccgccagatggctgatgaatcataatctctgcatttggaagagcatatctcttgccctttgcaccgcctgcaagaaggaaagctcccatgctggctgcaagaccgatacagattgttgaaacatcacacttgatatactgcatagtatcgtaaatagcaagtcctgctgtaaccattccacccggtgaattgatgtaaaggtggatatccttattcggatcctcagactcaaggaataaaagctgggcaacaacaaggctggctgttgtctcatttacttcctctccaaggaaaatgatacgatcttttaataatctggagtaaatgtcgtagttgcgctctcctctgctggtctgttcaataacatatggtactaaactcatataaaatacctcctttataaaagttcaaaagaccggctcagaaaataggcttctgagccagtccatcaaatcttgattcaaaaatcttattcttctgtagactcttctgcatcagcctttttctttgcctttgcacgctctttaacgttgtccatgataagatctacggcctttgtgatagcaaggtctttcttcatagactccttctcagcatctcccatgtactctttaagcttatcagcctccatgccgtatgccttagccatcttctctacctcagcatcgatatctgcatcagtaacctcgatgttctcctccttggcaatctgctcaagtacaaggctgctctggatacgtgttgtagcctcaggacgaacctgatccttaagctggtcaactgtcatgcctgagaactgtaagtactgctccattgtaagaccgctctgtgcgattctctgagcgaactcctcaaccattgtctcacactgtgtctcaatcattgcctcaggaagatccatctttgacttatcgataatcttctggatagcctcatcctctttagtcttcttagcttctgtctctttcttctctgtgaggttctttttgatttcctctttgtactcagctaatgtatcaacacctgctgcatcctgtgcaaactcatcatcaagctcaggaagctccttagccttgatctcgttgatcttaaccttgaatgtagccggctttcctgcaaggtcagctgcctgatacttctcagggaatgttacattgacctcaacctcatcgcctgtgttctttcctactaactgatcctcgaatgtatcgatgaatgtgtgtgaaccgatctctaatggatgattctcaccctttccaccctcgaaagctactccgtcaacaaatccctcaaagtcgataactgctgtatctccctctgctacaggacgatctgtaactgtaactgttcttgcatttttgtttctctggttctcaagctcagcgtcaacctcttcatcagaaactgatgtgtcgatctttgtaactgtaacgcccatgtacttaccaagagtaacctcaggtcttacagcaacctctgctgtgtagatgaaaggctgtcccttctcaatctgagtaacctcaactgttgggcgtgaaacaatgtcaacaccgctctcgtcaaccgcacctgcgtatgtctgctgcataagaatgtttgctgcatcctcgtagaacacacctgctccatacattttctcaatcatagctcttggcacttttcctttacggaatccaggtacgctaatctgtttcttctgcttctgatatgcagaatccaatgctttctctaattcctcagctgctacctcaatagtaagcttcgccatattatgctctaaattctcaacctgtacactcatgtcaatcgttatcctccttaaaaatatatatgaatggtatgtacatcaaatgtaatgtgggcattctttttaaactgctaagcccagtcattggatgattataacacaacaaatccactatttccagtgttttttacattaaatttgcttttgtgtataattccataaattgtcagcaataccaaaacatatttttgtcattttacggcataatatttccatacacatacagcttgtgtataacgttttaaaaggaggtattgcattatggcagcatcaagtagtaaaaaggcttctgtaccggaggcaaaagaggctatgagccgtttcaaggaagaggttgcttcagagcttggagttcctttaaaagagggctacaacggtgaccttacttctaagcaggccggttcaatcggtggcgagatggtcaagcagatgatcatgaagcaggagcagcagatgaaataagctctgcaatagcaggcttcaaatgtacgcttcaaatgcaagcataaaaagaggccgcgcaccatggggttggtgtgtgacctcttttgttataatactaataatatgattatttgctgaacgttgtattagtataccagtccctgtcgaatatgctctactgtggcatcgtctgtgaagtatctgacaagctcgagtgcaaacgcaatagctgttcccattccacgacttgtaatcacattgccgtccacaactacaggctgctcaagccactgtgcaccgagcagcttttcctcaaaacccggatgacaggtagcttttttgccctcaagtatatgattctcaccgagcacgctaggcgctgcacatatcgctgcaacaagctttccctcagcggcgaatctcttaattgtctttactacggtctcatcagcaccgaggtttaatgtacccggcatgcctcccggcagtacgattgcatcgtagctgtcaaaatcagcctgtgcctttgtggtatctgtcttaaatgtcacctgatgagagcttgtcacctcggctttttccgtgattgatatggtttcaatctccagctttgctcttctaactatatcgactactgtaagtccttcaatctcctcacagccgtctgccataaaaattcctactttaatcatatttttctcctttatttttctttgataatactatgataccttttgaccctttaatcatactataaaaagctgcggttcgtccttgaatttttaaataccggtcattataatcatatataaatgatatgagggtaaaacaaaaatataaaccgtaactataaatctaccagtaacctgaaaggatataccatggaaatcgaaagaaaatacttacttaaacagcttccttccaatttagacagctacgcgagcaagaaaatcgcccagggctatctgtgcacctcgcctgttgtcagagtcagacgctcaaatgacagctattatatgacctacaagggagccggtcttatggtgcgcgaggagtacaatcttcctctcacaaaagaagcctacgaccatcttgtccaaaagattgacggtcgtctcatcgaaaagacacgctatctcatacctcttgacggtggtctgaccgcagagcttgatgtatttgagggtgatctggctcctcttacacttgtggaggttgaattcgactctgtcgatgcagcaaatgaattcacagcgcctgactggtttggtgaggacgtcactgaatccggcaaatatcacaacagctatctgagccgattggaaaattcatagtactgcctggtctttattgtattctttaaatcatcataccgcttttgcaatgggccctcaggaactacaacatccataaccaccgctatgtcatctataaggcggtcggttatggtatccctcattgagacaagtatattgtacttctcttcaaaggtatccgcatcaagaaactccagcaaacgcggatccggtgcctggccttcatctgcatccggtgccggctcataacatgcctgtgtctgaacactcacagcttcaggtgcattagctgcaatcgcattagtgctcaaagagatactcttgttggaagagatactctttcccgacatatcctccggcttatccttaagtgtgatcttctcaaatctgtatttctgcttcacatcaggatatttctcatggtccacctcgcttacaaacatgtcgagtggtctggcgtatatcccaaaatcatcatataaagcctgataaatcacaagcttttcccctgtctctgaatgtgttgccactgtaactatctgatacagcttattcttaaagtgcctgtaaagctctccgggctttggtgttctgtccatcatttctgcctcttttcctattatttaaaagttgttaatcatgtctaagccttctccaaggaaatctctctcaaactccagattaccgctgtatcccatggcaatcagatcctcaacactgccaaacatgctctgtgtctcagcctctataatctttgcaccgtctgccgctttggtatgcagtgtctggcagtttcttgagtgctcctgagccatcctctgctgtgcctcgctatgtccgtgcatagcctcaagctctttttgtgtcgtatcatccgcaaagcgtgcgttatttttcacggccctctgcactatatccggattgctctgctgtgctctctgctgtggctgtactctctgctgcatctgtggtctctgaggctgctgtgctctctgctgcatctgtggctgtggtttctgctgatatgtctggttcaatgcattcatacccgactgaactgtattctgcatgctgttccatatctgctgtatctgcttctgctgcggtctcggtttgtttggctgcgtgtttttgctgcctgcgctctttgattttttgttaatgtaaaaaacagctcctaagataattgcccaaattataacatccatattctgctcctttatcaatctgcattttctatgtcaatccctgaatatcctgcacatatcgcgcagtatgtactctgctgtctgttccggctcccattgctttgtaacacccacaagcagtggcttaagctctgacagtatccttgccgtgcgccggtctgtcgtgccctcatacttatcgtttatggcctcagcctgcttcacacatgcctcaagctgctttaatatatccttccagaactcctcgtaatatatctcatgcactctcttagtcttttgtgtgaaattcagctctgcaagctctttgttgttgtgccccagatagaaatatgacagagcaaacaaatcaggctttttcctttcaagcccctcatttgtcaggtgtatcagattctctatctcactctgtaaaatgataccgttgtcaaaggatgacagatatctctccccctgctttacaacagagtccagagtcgtgtgaaaatccgtgtccaccttgctgattaaaaattcatcgtcaaacatgccgcttttcgctttgcaagcctttatcagctctccaaagtgcttccggtcggttcctgtgagctcacaatacccgataacttgttgctcaagctcctttaaatctgaaagtaggctgcttaaacctgtcttcacgccataatagcgctttgcaacaccggaggaattctttttggttttgacatacagcttaagccagctgttgaccactgtcatgtcggcacctgccgtatccatcgctgtcttaaatttcttttccgtatcacttagtcctaaaatcatcacacaccctcaaacatcattctaaaactatataataacaattctacaccattatcatatttttttaaagagccttttttcgctctgaaaagcccactttaaacgcaaaaaaaggaagccatacaatagctgtatgacttcctatatactctgcatgttattcgcatcgtcgtgcgaatggcacgagcggctttgttatgatagcaaaatcagattaacgaccgaactgcatatcgttgttacctgattttgttgtgaacatctcaagcatgttgattggatcgttgtaatccataagccatccctcacgggcgaaatcaaactgtccgtccttacggctgttaaggaatacgttccactcctgctgctcaacctttaagttgatacctacctttgaaagatcagcctgaatagcctcaccaatctttacatttgactctgagttgtttacaaggtatgtgaactcgacagtctggtttacctggcctgtgctctcatctaataatccgatagaagcaagaagctctttagcctcctcaaagttcttatcgtaatctgtgccgtagtaatctttgttcttgaactcgccaccgttaccatctgtaacaccctctgggataaatgttgtggcaatcttctgtccgccctgggcgattgtatcgataatgtactgacgatcgataagaagacagattgcttttctgaataccttagcctggtcagcatctaatccaagttctgagtagagcttagagttaatgttgaagcctacgtagtatgttccaaggttgtctactgtgtagaattcgcttgtcttcttagctgcctcaatctctgctgtaggaattgaatcaataaaatcaaggtcaccgttctggtaagctgtgtaagctgaaacatcatcagatgtaagcattacgttcatctcatcaactgttacattgtcagcatcccagtagttaggattcttaacatatgtcatgcttgaatcatgcttccactccttgagtgtgaatgcaccgtttgtaacgaacttgtcgcttgcatcgtttgcccagtcatcatttccctctactgacttctggtttacagggaagaagaatgggaatgcacataagtcaaggaagtatggtgtaactgccttaagcttgaccgtaagagtctttccatcatcagaagcaactacatcatcagcagcaagcccctttgtatcatcatatcctgcgaatactgcgcaaaggtagctgtaatctgcagctgtcttaggatctgcagctctcctccaagaccactcgaaatcctttgcagtaagctcatcaccatttgaccacttaagaccgtcacgcattgtgaatgtgtatgtgaggccatcctcagaaacctcatagctctctgcacatgcaggctcaagcttgccctcagcgttgtaacgcataagaccctcaaagctgtttactgcaagacatccgccgtcaacagtactgtttaatgcaggatcgatatgatcaggctctgatgccatgaagatgtttaactttccggcattctttgtgttctttgcattgtagaagtatttcataccctctactgttgagtatacgtctgtgacataatccttgagcatatactggtcattgtagtagtaaagtggaataacacaccatgtatccataagcatatcctctgcctggtgcatcatctctgcacgctttgcaagatctgcttctgtacggatagaatctactaactcgtcatagcttgtccagtctacgcctgctgatacagcagtatgagaagtgccgttagcagatgtgtcgttagtagatattttgccctcgctcttgcttccacaagcagtcatgccaagtgccatagctgcaacaagagtaagtgctactaatctctttttcatctttcttcctcctaattaattaatatgaaaaataaatttatgttagaaccggcacatgtggcttaagctatatgccggtaaaaaccttatattagcggttgaagcatgcaaccatatgtccgtttcctctgtctgtaagctccggacgtgctgctgcacactgttctgtcgcatatttacaacgcgaacggaatggacagccgctaggcatgcgaagaggtgaaggaacatctccctcaagcacgattcgcttgctgtgtctggcagtctcaggatctgggatcggaaccgctgaaagcaacgactgtgtgtacggatggattggattgtccatcagctcatcagcatctgcaagttccataatatgacctaagtacataacagctattctatcagagatatgctgcactacaagcaaatcatgcgctataaacaggtatgataaacctctctccttctgcagatcctcaaacatgttgactacctgggcctgaattgaaacatcaagtgccgataccggctcatcacatacgataaacttcggatctactgcaagcgctcttgctattccgatacgctgtctctgtccacccgaaaactcatgtgcatagcgtgtggcatggtctgcgtttagtccaactgtctccatgagatccataatcatctcatggcgctctttcttgctactgtaaagcttgtgcacatcgagaggctctccgatgatatcctcaaccgtcatacgcgggttgagtgatgaatacggatcctggaataccatctgcatctgcttacggtaaggatgcatatccacatctatcttcttctcactgtcaaacaatacattgccgtcgaactcaatgcgtcctgctgtaggctggtacagacgtaaaagagtacgtcctactgttgtctttccacagcctgactcgccaacaagtccaagcgtctcacccggctttatggcaaatgacacatcatcgactgcctttaattccatctttttaaatccgtcatgaacagggaaatactgcttcaaatggtctaccttgagcaggtactcgttgttatttgtctcattactcatttgattttccctcctccatcatattcttaatattcatccagcatgatgcgagatgatcctctccaacccagatttcctccggcttttcggtgagacatatcttcatagcggcatcacagcgagggcagaatgcacagccctttggcatgttgagcatattgattggtgtgcctccgataggaacaagcctggtttttgaattggtctttgtagggattgaacgaagcagtccctttgtatactcatgcgccgggctgtagaatatggcatctgctgttcctctctcacacacacggccaccgtacataactatgatctcgtcacacattgaagcaatgacacccagatcatgtgtaaccatgatgattgccatgccaagcttttcctgcagtgactgcataagctcaagaatctgtgcctggatagtcacatcaagagctgttgtcggctcatctgcgataaggatatccggctcacaggctaatgccatagctatcatgacacgctgtctcataccaccggaaagctcatgagggtactgatttacacgcttctcaggctcatttactcctacaagtgtgagcatctctatagcacgctcttttgcttccttctttgtacggtctgtatgaagaagcactgcctcctcaagctggtagcctaccgtaaataccggattaagcgatgtcataggatcctggaaaatgattgagcagcattttcctctgaaatctgccattttctttttgttccatttggtgatatcctcacccttatattttactgagccgcctgtgatggcaccattctcagcaagaatctgcatgattgaatatgctgtaactgactttcctgagcccgactctcctacgattccaagagtctttcccggctcaagcttaaagctgacaccgtttacagctgatacgtctccgttatcggtcttgaaggtagtgtgcagatcagatacttcaagaacaaacttattatcttccatcttactcactccttactatttcgataatttagggtcaaatgcatctcttaagccgtcaccgataagattcaatgtaagaacaatgatacaaatcgtaagcgccgggaaaataagacgcaatgggtagctctggagtccgccacgcgctgtatttgccaacgaaccaagtgaaggcataggagccgaaacaccaagtccgataaatgacagataactctcagtaaagatggctgatggtatctgaagcgctgtagtaatgatgattactgacagacagttcggtaaaatgtgttttctgatagtgcgggctgatgatgttccgatacactttgctgcgagaatgtactcattctgcttaatggtaagaatctgacctcttataagtcttgccattcctacccagtaaagcaatccaaacactatgaaaagtgcaatcatgttgacaccgagctttgaaagcactgtaccctttattacaggtgtcagcacctcatttaatacaactgcgagtaaaatgatgagcagcatatccggcaatgaataaatgatatctactattctcatcataaccatatctaccttgccaccgcagaagcctgatacggaaccgtaaatgataccgattataagcacaagcagtgatgcaaacacaccgactcccagcgaaacacgagctccgtaaacaacacggataaaatagtctcttccgagctcatctgtgccaaaaatgtgtgggaacagcttctcacctgcatcaatctgtgcctgctcagcatcgctgtactggaaaggtcctaagttctgtgcacccttaacgatatctgcatagccgtaaggcacaatctttggtgccagaagaataaccaaaataagtaaaaccaaaactataatagaacccatagccagtggatttttgcggagtctcttaagaccatccttaaagaaggtagttgactcacccataacctcctgctggcgtttctcttcatctgatgccttggcaaaatccttcatatcgaacttgctaaggtcaatctgtgtggagaaaggagctctcttcatattatctttcatctttatctctccttaatcaagcttaatacgtggatcaatcactttgtatacaatatctgtaatgaggttcgcgcctaccatgatgacagcaaggaaaagtgttgtggccataatcattgtgtaatcacggtttgtgatacagcttacaaacttggaaccgagtcctccgatattgaaaatactctcaataaccattgaacctgtgaggataccaccaatcataggtcccacatatgtgatgaccggaatgagcgcattacgaagcgcatgtacaaatataatcttgtactgatgtacacccttggcctttgccgtacggatgtaatcctgtccgagtgcatcaagcattgaagtctttgtaagtcttgtaatatatgccatcggtgaaagcgacagtgacagcaccggaagtaatatcatgttgcttcctgagctgaaggcctgcaccacaccaagctttatacagaagaaataaagtaataacgtagcgatgacaaatgacggcatcgacgtaatcagtgtgacgaagaatactataactcgatccggccacctgtttcgcatcagcgctgctatcgaaccgagcaccactccgaatactatcgctgtaagcgccgctaaaagtccaagcttcgctgaaatcgggaagctctccccgatgatatctgagatcggacggtctgtcttaagactaacaccgaaatctccgtgcagcacgcctgccatgtaattcttgtactggactataagtggctgatccagtccgtagcgtgcctcaagctctttcattaccgccggactctttgccttctccgaattgaatggaccacccggaattgcattcatggcaaagaatgtaataagactgataatgaagattgtaaaaatcgcgagaataactctctttacaatgtacttacccatatttttctctccctcttggatttgtatcgataatgcattatttttattttttaaagcattatcactgcaccacgtcaaagtattttgtctaatacgcaaaaaagtgcgaatgacctcattgtcattacacactccctaatcttgctgtctgatacaactgtcgttctgacgcgaacaattcttttttattatacacataaatcatgctttgtcaattggatatattttcctatattgttttcatttctgcataaaaattagtcatttttttataatactcattaataagggtaatttatgcagttcataagcattatttatacatttttattcatttttatttttgcattaatatattaattttcagtgcatgattactttgaattgttaagtaccggcgttattctggcattaaatgggtatttggtgtataattacttatcattatatatcaaggagccacctatgcttacatacgacgatgcactcaatctcaactactataaaaaaacaacctttaccggctggatgaacggcatgcgctttctcataaagcgtgaggagccagtcataaaggaagccaccgaggatactcccgaggaaaagggtgagccaatctttcatgcatggatatggccggggccgtatatttttgacctgactgacgacagcaaaaaaacggacaatacctttccatttacagatgacggtaaaaaacagtgtgtagactggattaatgaggtcatcagtgcgcactcaaacgaatatccgaaaaataaaacagatggagaaaacctctaaaaaactcttgacttctcaccaaaaatattgtagtatacgttttgtgcaaaacacaagggcttgtagctcagccggttagagcgcacgcctgataagcgtgaggtcggaagttcgagtcttctcaagcccatccttgtaataagcgtattatgaaagccacggattgctccgtggcttttgttttacgtgtatctacacctgcacaatgtgtccgtgtctgcctattcctttaaaaaatccagcattaattccatcatacttttttgaactgcactcagaaatcataagctgctgcttgtatttgtaatcatcccactcgagaattgctgtgacgtagggctgttcctccattacacgcacagtcgtatttttctttgaaaacacagggtattttccggtgtatcccttttgaagcagctcctgttcaagcgctttacgcttttcttttatgcgttcatttatctgatttccgtaatttctctccggataatcctttgatgcctttatcacaagcttataaatatactgataaagcggtactctttttgcatcggctaaatgtctgctcaaaagcttttccgttttctcacatggatttgccctgtagcgtgcaatgagcttaagataatcaatgtccgaaacctccctgcaaagctcctccataatgtctattccctctacacgggccggaaaatgatactccatcaaatcgccgggtaccggtgtccatctgcgaaacggtgcaaagtaaataaggctctggataaagcattctgtctcgttgcagtattcctttcccatgtacatatacttgtccgcgatggttcctaccatatatacaagcatgcgccactgctcctgtccctttacccagaaatgtcctatttcatggtatttaaagcatgcctcatgcacatgcaaattatcaaaccagagtgtcatcacattgtcctgctggtgaagaatgagtccataacctttttcacttcctaaaaccaacgatgccgaaataatttcttcctcgctatgataatcgccctttaacactgcattttccacagtcagatagcattccaccgcgtcattcatgatatatgggattatatatttgtcgtcacttctgcatatatcaaatgaaccgtaatcaaagagttctgcgagcatgtaaaatgcgcgtggcatatcctcttttaagccgggaagtgcttttactaaatccttgtaagcctgcattgtggtatcctttcgtataggaaaaatgataaaaaaataagaatttcagaagtaataaaaacctctgaaacccttgtaaacagtacgggcaacaggacttgaacctgcacggtctcccactagaacctaaatctagcgcgtctgccaattccgccatgcccgcaaacactttgacagtatatcattttgtttcatgtgtgtcaatattatttatcacattacaaaagtacattacaaaagtaaactattcacattcaaactgtatttccacaacaaaccgtttcccctcaagtcttgcttcaatacttccgcccattctctccacaagctcctttgcaatcgaaagcccaagcccgctcgatgatatgctcctagcctcatcggctttgtaaaaacgctcaaacaccttgtccacgtctatatcatcaggattttttacatcatttgaaaccaaaatatggacaatcctattttttgaagtacgctcgtcatctgaagccctgcaattgcacgaatcctgttgcttcatctgtatgcagatgctcttctgcccatgcaccagcgcattttttattacattctgaaacacccgcctgagcgcctgcacatttgcagtgataaatatcgtatcctcacatatatcaagtgacggctcaatgccctgctttttccactcctcataatacgaaaacactgtctgctttaaaagtctgctgacacagcaattagacagctctagcttgaagctgtcatttttaagctttgtgaacatgaaaagctcctcgagcatatccttgaggcttgtgatgcgctcctggatgatatctatataatgctcctgcgcgctcttgtcagtctcatccctaagcagctgaaaatagccgtccagcgaggtaagcggagtgcggatatcgtgcgacaggtttgtgtacgtgtcagatatcatctgctcctttttcgctgctgcctcacgctgcctgtgccattgctctaaaaatctgtttatacgctccttaagccttccgatatcagccatgttggtatcggttaaaaggagcatatttgtatccttttcgcataaaaaatcaagctgttcgttaatgtcacgaagctgtgcccttatttttacgagcacagctattaagacagctaccgaaactgcaagtattacagtcagtattttccaaatcatgttttattcctcattcaaaacacattatatatccctgcgtttaaatacaccgtacactgcaatcagtgacaccactgcccacacagcggctaccgcaaatgcaccgcctactgtctttgcagacgcactcagatcaagctcagaaatctgattaacaataaggtaatcatttatatcaaagttctttactccaattttttcaataagtatattgattccactgaaaatcagtgtaaagatacctgtacacatgcacacagcgataatcatgctgattacattgttttttataatgattgccattgccatgacaaaatatacaaataaaagtgtgaccacatactggctgccaagcatcttaaagaagtctgctgcatctccgaattctgctccatgtaaaaacagcggtgtcgcaatacactggacaatcacatcaagtgccatagccacaaaggtaaataccgaaagcgctatcatctttgaaaacagcagcactccacggcacttcacctgtccgcctacgctctttatatagccgctgtttaggtctgctgttgaaaagagcaccgtaaatattgcaagtaaaagtgccaggtcaagacccgctatatcgctttcaaccatatctgctatggtcggtacctcatctgacatgtcggattcatccatttcaagcccgactgttgccgttggtccatttgacgattccgctgatgctgtatcgtattcatctgctatctcactgtctgactcacttaccatagtgacatcatcagttgtttccacgatgctctctgtcgccatgcttctgacaagagctgtcataccgctcatagctattgcgagtgccatagctattacaagtataacataagctgactttgtatgtatcagtctgtaaatatccattcttaccgcattaaacatttgtcgcacctcctgtgatactaaggaaatatgtctcaagctccattcctgtgaccgctagctgtgccaccgaaactcctgctgtgaccagcgctgtatttaaggcggcgctatcattcaggcgctcatagacatctatatgatttttgtccactatcatgtagtgcacaaagcccatcttatcgagcacaggcactgctttatttggattgtccactgtcagtgtaatcttttcactgcacttggaaagcagctcctctctggtaatttcctgaagcagggctccattatttataatgccgtaatctgtggcaagctttgaaagctcctccaatatatggcttgaaataaacacagtcatatcctgctgtgcacacagattctgaatcgtatcacgcacctctgcaattccctgtggatcaagtccgttgataggctcatcaagcactaaaaggtcaggctctccaaccagcgccatgccgattccaagcctttgcttcataccaagtgaaaaattctttgtctttttctttcccacatttaacagacctaccttatcaagtatgccctctgcatagccctttttactgatgccgaagagacggcacttcatctcgatattttccttcgccgtcatgtttggatatacacccggtgcctcaatcaggcagcccactcttgagcgtacctttgacaaatcctttccagcgtatccaaacatggatatctctccgcttgtcggctttgccagaccaccgatcattctcatacaggtagtcttgccggcaccgtttctgccgataaatccatagattgcaccctttttgatgtggatatccacattgtcaaccgctttctggtgtccatactgcttggtcagtgcctttgtctgcaataatatttcactcacaatcaaatctccttttcttttttccttagcaaccctttaatcgtaaacgtcaaaccacgcgccttggataattagcatttttgtgagacactctataagacacgaaaaaactaatagttttttagaggaggcaaactatcatggataaatgtactcacgatgtaaggcgtgctaactggttaaatatcataaatcaatgtcaggaacgacctgcaaacgtaactgtccatcaatggctgaaagacaatgatatcaaggaaaaatcttattattactggctgcgcaagtttcgtaaagaatcatacgaccagatgcagctgcctgtaacaaccgaaaatcctgccgaaatttcttttgttgaaatagctgcccctgttacatcagagaaaactattcaaacacgggaattttcgtcagcttctaacgcgactgcagttgtcaggaatggtgatatcattctcgaaatatcaaacgatgtttcagatgctgtgctaagcaggctcttaaaggaggtagtccatgctggagaacgttgctaaaatcaatcgggttgtgcttgcgtgtggtacagtggatctgcgcaaaggcattgatggtctctcgatgatcattggtgacaaatataagcagaatccttttgagaaaggaaccttgttcctgttctgcggtagacgttccgacaggattaaaggactgctttggatgggcgatggatttcttttgctgtataaacggattgaatccggttcactatcctggccaagaaccacggaagacgctgcggatcttaccgaagagcaattcgattacctgatgctcggtttaaatccgctcgatcctaaaatcaaggatgtaacaccacaaaatcccttctgagtttgtgcaaaacagagatttttcaaagacatttatgacgtcaaaaaatctatagttgaacctggtttatatgcctttttcacaactggtacaatggttagctgttacttgaaacaaatatcttgaaatttgaaagctctatatttccctgcgtttatcagcatcctatagccttatagcgataggcataatgacggagagctaacacacaagaattcgctaattaaagctgcttctgttataatgaaaacagtttaagggagtgaagcaatggcacagaaacatacattggaagaactgaataattgcagccgcgaagaactgattaccattgttcttatgatgcagggacagctcgatgctttaaatgataacatcgaaaaactcattgagcaggtccgcattgccaataattatagatttggcaggcatacagagagcttaaaatcaatcgaaggccagctttcgttttttgacgaagcggacgccgcctatgatgaatcttccagggagccttctgctgaagaggtcattactgccaagcgtacaaagaaaaaagggcagcggaatatcgacctgaaagatttcccggaagaaatacttccgccatacagtgtttctgaagaacagctggatgctttttatggaaaaggcaattggcgccgtatgccggatgaaacctacaagaggcttcgtcatgagcccgaagcatggactgtcgaaattcatactgtcgaggtgtatgtgggaactgatggtgatcatcaggatgagttccttcgtggaaacagacccaaggacttgcttcgcaacagtatagtgacgccatcattactggcatcaatacttaatgtaaaatatgtgaattcatcagcattacaccggattgagcaggagtttcaacgtaatggcgtaaatatatcacgccagacaatgtccaactggattgtcagatgctcccagatgtacttcactccgtttgttgaacggatgaagcaggagctgctgtcactgcatgtcacacagtcagatgaaacaccgactcaagtaatagcagacagcgaccacccaaacagcaagtgctatatgtgggtgcaccgttccggagagttttatacccgacgcccgattgtgatatatgagtaccaaaaaggacgtgatcatcaaaagcctctggatttttacaaggattacaaaggaatccttgtaacggacagcctgcagcaatatcatctagttgataaaaagcttccagatgtgacaaacgcaaactgctgggcgcatgcaaggcgtgattttgcggatgcggttaaggctgccgataaaaaggatccgtcttctgtaaggcagtctgttgcctatcaggcattgcagaagatagccgggttttataatgctgacactgagttaaaagggctctcatcagaggaacggcttcaaaaacggcaggaattgatccggccgctggttgaggaattttttgcgtgggtaaaacaacaggttaacgactgtgcggtacctccaaaatccaaaacaggccaggggctgaatttcataatcaatcaggaaaaatatcttaaggtatttcttgaagatggagatgtccctatcgataattctgcctcggagagagccatacgcaccttttgcctcggcaagaaaaactggatgttccacaatacagccaaaggagcatctgccagtgcgatggtatacagtatttcagaaacagccaagctgaataatctgcggccgtattattattttaaatatatcctcacagaactgccaaaactctgtgaagaaaaagaaaatatagatccagaaaagctggactatctcatgccatggtcagatagtcttccggacgaatgcaggaagccacgtcgccaataatgggcggcgttgattttaatgactggcgcatggtttgacgtttacctttaatcataatataaatgtaaaatcctaatacatcgctaacaaaaagtaaaaaaagagtaaagcttgtttacctttactctttcattttgtagcctatgccccacacggtctctatgtactcgtcatcggtcagcctttttatcttctttctgatattgctaatgtgcacatcaagagtctttgtctcgccaatatacggctcatcccaggcatattcaaatatgtcctccttggcaaacacctgtctgggatgcgccatgagaagctcaagtatggcaaactcctgctttgtgatgccgtcaacagcgttatctgccacgtaaagctgtcttgaaatccgatcgagcacaagctgtctgtgctctattttagcaggacccgctatgtatgtatttgcagtatctccctgtccggtatcattttctgcttttgtccggttttcccctgcctggcccgactttgaaggtacatctgccaccgcatgacgtagctgcacagccactctggcaacgacctcctttatctcaaacggctttgtaatgtaatcatcagcgcctgccacgagcagattgattttctcatccagctcatcctttgctgtaaggattatcaccggaagtgacgcatccatctgccgtatccgtgccagaagctcctcccctgaaagccccggaagcatcagatccaatagcacaagcgcataagcttccctttccagcttaagcaaaagctctccttctgtgcctgaccatgcctgtcttgttctatatccggcttttgaaagcgctgtcgcaagcagatcattaatgtccttgtcatcctctattatgagtatctccccggatttgttgtctgtcataatatcccctttctctatccattgtaccacttctatataacacttctataataacacctctatactgacaaaatcatgtcggacgcatttatctcactatgcgtcctattcatttgaatccgcctgctcatcgcatgtataggtaagcttcttcttgtaggtctcttcataaaccgctttccaggcctcgtagttcttatcaagaatctcctttgcatttaccgcgctataattttataccaaaagaagtgcagaaatcgccttcctgcactatccatactgtagtcatagtctgcatctattttttttgccttgattgaagcagaggaaaactcgtcctccagctcgttttcgtaataatatactcgcatgtatgacattttactattattcggttgtttttgcaaactttagtttttacctaaacaatacttcacatgatatatcttacttttaaaaaatatacagtcaacatatttaccacaatactttttctttaagaattacttccagaaaaaatgcaatatccccataaactactgctcttgtaagtatactaacaaaccttcacctttaatccaacaactacctaatcacttaacttatacactatatttaataaattcactattttgagatagaaattttattacctgatagtaaatcattatattttctattacacgtagtaaaaatgacctgatttctctcagaaaatttctgtattaaaccgcatgcttgcgaaactctttcatcatccatatccgtaaaaggatcatcaaatattgctaacccctctccctctggatataattgttctagcattgcaagcctaaacgctaatgatattgtatcttttgtaccatctgacaaaatatcatatgttaaggcattaactccactggataaattaacatccattttatcattcattgattcaagttttactcctccactcgtaataacagatagatactcattaaactttttctctatcccttctatagggtttcctgatgtttctttttttatcttactaaatactgcatgtatatttttcc

SEQ ID NO: 659 - DNA, 110409 bp, Agathobacter rectalis
  source 1..110409: mol_type = genomic DNA
tccttgtccatgtttggtatgtatataattgtatatacctattttttccaatttcgctcgtatcctccggatattcacactcaaagtattatcatcaacaaacatttcattatcccataaatactctatgatttctgttcgtgaaagaattttccctttcccttttattagaaaccataatattttaaattcatttttagtcagttctatttctgattgatcatgagatgccaaatttttctctacaaataaggttaaatctttatattctactatctcattctcgctgtctttatatatacgtttcaataaattcgatattctagctaataataccggaacattatatggctttgtaatatagtcatcccctccagagataaaactatttaattcatccatatctgaatttctactcgttaaaaaaataattggaactgacatatctgctcgtattttgctacaaatttgataaccgttctcacacggcaagttaatatctaataatatcagatctgcattttctttactaacctgctctgctacattttcaaattcttcaatgcaacatgtctcatacccattattctttagcatagttgctaattcattacgcattattttttcatcctcaacgatcaatattctatacattttattgtccccttaatattgtaactgtatttgcatattgagcaatcaaatatactcatgataatttcttatcgacggacattctatatttacatgttttccgacattcgtattgtgcttctcatcataaccggaagagccttgatatgccacttgacaagtatagcatattcaaggctcaatttcatcagatttttagatcatcaaccatcaataatattttatcttcaatcattctttttcttatttacaaattcttttatacttgaaacaatatccttcctattctgtcaagcctaaatctattgatttttctggctttaacgatatttatttacctcaaaacaaaagccgagagtgatggatatcgtagtatcatgtcccaacttccttcgtcccatctaccatacactgagtgccagccaagctcctaaacggggtcatgccccacggaaaaaaccgctgccggctacagctctagttttttgtttgatttttactgacctgcattcacctgtcatggtactgatttgcttagtggacgctataccatatcaggttcttgttgatcttttgcagatgcagtccgttccggactccatcatttatggttttctattccagaaccctgtccagtctccgaggctacgtcggaaaaccgaatcagatttcaaacgtacaacaagtgatttgatatctgagaactgttcaatctgcatggatataagtgtgttgaacagttgctttttggaatagccattctgaccgcgtctgtgagagtcgggtttgaaatattcatccaaaagcgtgtaatcaatgaagctcaataaggcttcgagtttagaaagaggtttccattttgttttttatatgctccacaacatcagcaaaagcaaggtctatgaattatgaaatttcttcaatttatataaaaatctgcttaactctgctatattatcaaatttacgtttatactcaccactgttaatataagccaaatttactatagttttcctgtttcttccctttctctgttgttccatcattcccccttacaaaagctttaaagtatcttaacgagacatgtctttcctcatctttatatattcacgaaatacaggtctgatcggatcagaaatatcctccggaatatcatccacatcgaaaaacttaagctcctcgacttcatcctcctggcgctttatggtgccatgatatttgcggcatatgtatatgatttccacattataaacttcatcgccgttaggatagatgtagtgagtctcctcgcctgaattgatataaaacagctccatctcgtctgcaacaagtcccatctcctcaaagagttctctttttgcagcctcctcaacagtctctccaagctctatagaaccgcctgcgtagccccactggtgattgtctgtgcgctttccgagaagcacctgtccgttttcattttcaatgatgatgctcgctgccgcctgcagtaaaggggcatgtccgaccacctttctaagatccattatataattgctcattttgtatcctttcttattttaccagttcttctattatacactcatgcactttagtctttttatcataattaataccgacaagtaaaatatttcctgtatactgtaaaacagactgcggatactgtctgtcttttatttggtttatcgcagtttttacgtctttattccatttaagttcaacaaccaaagccggataatccatgacatattcctgttttggaatgaatacaaaatcagcaaagcctctgcctgttggcatttcacgtacaggcttaaaataatatttcatggccgaaatatatcctatggcaagcacactactcaatgaattttcattatggtactgtatagtggaagcatactcgttgtgaattttatcaatatattccgcaaccactttttcttccatatcaagcgttgcctcaagaagccgttctgactgggtttcaaactctatcagctcgttccacttatcatcctcaaccgcattcataaactccatacgaatttcctcattcggaatatatgccatctgccgtttctgatcatatgccagatatccaaggtgtataagcagcgtcataacatcatttttatttctgaatgtaaccatgtcgttctgaaatgtagtagttttaacctctgtttctgcacctgaaatcatttcaactatagcactcttaagaccatcaaaatccttatttatgagtggctggatagagtcatatgtgcctgtctggctccaatagctttgaaaattcccccatttaattacattactcacagcttttggattatatatatgatattcacccagcaggtaaccatcataccatttcttcacaagttcaaaatcacgtccggacttttcgcataatttcttcacttcatcctctgtaaaaccaatataatgcgcaaatcccccaggagatatcatagtgaattcttcaaaattattaagtgccgactgtgtcttaagcttcttaatcggcaagattccggtcaaatatgcaagcgcaatatatcttgtagccgatgaacctttaaaaagtcctctgagaaaattaatatactcctcctgtaccgactgattatttgcctcatcgcgaaccagaacatcccactcatctattatcactatgaatctttttcctgtctgtgcatttatttgtgaaagcatatctgaaagcgtaactctcccttcaaccttcacatccggaaatgcaagtttaagctcagcgactgtattctctataatatatgatacaacattttccgggccttttgccggttctatacaccactgtatatccagatgcagcacatcatatttattaagatatttctcaaagctacccttcttacttatatcatatcccataaacagttctctcgaatcacagcccatgctataatatgcagccatcatatctgctgtaatagatttaccgaatctgcgcggtctgctgttacatataaattttgatgtggtatttatcacactgtttgtgtaatccagcaaacctgttttatcaacatatatctcagagttaatgacatcctggaatgaactgttatccggatttaaaaatcttcccatagtctctccttttaaaatctcatcaagcaaaaaatccgctgtactataatacctatagtatagcggatttcaaatttgttttccatatataaactacataaaattcatcagctcacagccctatattcctcaagcgcttccttagcccttggcgtaagcctgcgtggaaccgaaatctcaacagtcacatactggtctccctttactgaaggattcttcatgcttgaaatccccttgcccttgagacgtatcttgctgccgccctgtgtacctgccttgatgctgcactccacatctccataaagagtatgcaccctcaccttaccaccgagagccgctgtcgtaaacggaacacggattgtactgtatacattctgtccctttcgctcaaactcactgctcggtgtcacatttacgttgagaagcacatctccggctgcaccaccgtttctgcccggatttccctgtcctttaagtctgactgtcttaccagactcgattcctgccggaatatggatggacagattggaaaccttgcctgtggacggatcctgtaatgaaatagatttctcgcatccgaaaacagcctcgtcaaatgaaatcgtaaggtcagccataacatcagaacccttgcggctcgatgaacgtccccgcgctgaaccacctgtgaagttgctccaatctgcactgtttccaccgaagccccctgcaccacctgtgctgtacgagccacgacttccggagctgccaccatgtgaaaacatatctccgaacattgagaaaatatcatccatatccccggagccgttctcaaaatgaaattcctgatgtgtaaatggtccgccatttgagctgtatgagccactgaaagagccattgccgccgaagccgccaaagccaccgaagccaccctgtgcagcctgccttgcagcctcctcggaaaagccctcctgcagaccagcaaagccaaactcatcatagagcttacgttttttctcatcacttaatacattgtatgcctccgtgacatccttaaacatctcctcagcgtgcggattgcctgcatttgtatcaggatgatacttctttgccagcttacgataagccttctttattgcctctttatccgcactcttgttcactccgagagtctcataataatctctctttgctgccattatactcacctgcctttctatttacctgtaacaatttatcatcataattaaacaatatacattacaccatatagtataagcggactgcacaggcagcccgcttatcatttgcaatatctgattatccctcgatggagatacatttcttttcctcaacctgtggtttaggctgcttctttggaatatccaggcgaaggattccatgcttgaaggatgcctttatgtcatcctgctcaatctcgtcacccacatagaaggttctctgacagcttcctgagtagcgctctctgcagatatacttcttgccctcttcctctttctgatctttctctaagcctttctctgctgtaatggtcagataaccattctctaaagaagccttaatctcatcctttttgaatcccggaagatccatctcaagctcatagcctttatcgctttccttgatatcggtgagcatcattctctttccgttgtgtccgtataatttcttctgtgccttctgtacgtccctgtcatcaaaccaaggatcattgaaccatggatcactgaaaaatgtatcaaataagttgttgtttgtagttgttaataacataggtcatacctccttatatacctgtaactttccttttggaaatttgctttcttttgtttacaagtatgttatagcaccattattagcactcgtcaatagtgagtgctaataaaaattataaactttttattaattagttacagcacaaccttatcttctgcggatagtactgcagcaccatatacagcttcatcttatctaccctgttccagtctttctttgatacctgctgctcattcattgtatacggtatcacaaaggacgcctcctcaccggcattaagctttatctccaaagcttccaaagttggatttaatttaaaaaacagctccatatcatactgattaccattggttcccatttcaaacgcaaggcttgtaagatcaagtgatgttgtatcgtcctttactttggtaactgacaaggttataagtcccacacgcacactgtcaaaaggactttctgagccatcatccatctgatgatatacataatcaggacatttttcttttaggagactgccatcgccccactcccatccggtctgctttatctcataatttccaagcttaatagtgtcattttctgtatatgtgatgacctttggggatggatagcaatgattcagataaacaatccttgccaaaacagcaatcatcacaattcctatgagcattcccgaaaaaagtcttacttgttttgatttcctttgcttcataataaattctcctcgttacttcaatttaaaccttccgctgtccaccagatagattacatcggatagattttcaagctcatccttatcgtgagagctaagcagtataagacttcctttatcacgcatatcccttatgatttctgacagtttttcctgtccctccttgtccagggcgttaaaaggttcatccagcaaaagaagctttggttcctccataatggcacaggcaatacccagtctctgcttcattccaagagaatattttctatactttctcttatcatgcgggttcagtccaaccgtttcaagtgccccacttatatccacttcacctttatttattgatgcaagcatttttagattgtcatagcctgtataactatctataaaggcaggattctcaattagcatacctatcttttccggaaaagccatattttttccaagcaccttgccatcaatactgatggtaccgcttgtaggatacataagtccgcttaccgctctcataagcattgtcttgcctgagccgtttactccctgaaatccatatatattaccactttccagtgtcatgcatacatcatctagtaccagagcatcctttatctttttagaaacatgttctatctctatcttcataaaatacctcacaaaatattctttctgttaaaatacacacttccggatacaatagaaaccaccatcacaataatgcagcttattattccggcagccgcatccattccgcccgcacagagcctgttgtttctgatgatcataagataatttcccataagaaacggactcacccagtaaacagacaccacaagataaactattgaaacaatatatccagcgatcgcaccggcaaaaatactgatagtaagctgcaccaccgcaattgtactggcacatagcattggcagtatcagccatacaagcacttcatttccagtcgcaaactgctgcatatctattcccatttccatgagcatatcatcaggctttgtgctccacttcccgattgcacatgtcacagccgcaagaaccagtatcattgcagcataatacataatcacatttatgaccgtccatatgtacttactccataaccacttaaacctgctgcctgacaatatcagtgtctttttgcctgcaccatacagatctgacgatggataaaatcctaccacaaaaaataaaaacgcataaaacaaaaaccatgacaccggaatggtgaatacgctgtcatctgtctttatgtatggcggcataccctgaagtatatttgtaaagtatgccaaaaatccaagctccggtgaatttacactaaaatcactgacggtgataaatgaaaaaaatacaaatatgaatactccgactatccattttatcttgttttccctaaatccttttctgatatcatataagatcagatttgcaaaaattctcctattcataagcaacaagctctttctttaccgcatgtatgtaaaatataatatttaccactataaggataataaacgcacagatcacaacccggatatcatttctaaacggtgcacttggtctaagaaacattaccggtgataaactcaccctgtttacaaaatgaaccatgcagaacacaaatatgtatatgataaacggtgtcagcaatatccagaaccggcttcttacaaaattaacagcccacaacaccgcacagtttaaaagtccccagaagcagccatcaatcagcacaaaaatcagattgtatacaagtggatgtgtataaaatacccctgacatgatatccattgccgctaccgggaatgtgcctgttcctacctgtggtattaccatcggaaataccattgcagtaagcataaagtcaaacaccagtggtatcattccaataagcgcaccgcttacaaatgcagctccatattttgctcttatataatcgctcttctttcctcttgatatgatctgggcagcataccctgatttaacatcaaaataaaagcttctgccatacggtatggcacacaaagcaggcattatcagataaagcagcaacggctgcacacttgcattatccgcacctatccatttctcatatgcagacaatggatacgtgtcgtagtaaacatacatcctccatatccacacattttccataaaatgccatacacatattgcaaacgcaacacacaatgtggcagcaaataatctatttctaaaagcacgttttatttcgagtttaaatattctattcataactacagctccagtttaaaatatttttgtaccttatcattggtttttgaatctataccctctatacaataataaatatacttagagtcttcaggtattccctcatcctgaataatatatccaagctctgatgtaatacactcgcctttgcctaaaacataatgatatacatcactttcatctcctccaagccaatagctatctatatatacactatctgaattttgctgtattctctccatatcattcttgatggcatacagaatacctgcatttctatttccttcaagctgcttatcatctccatccttataagtgaatgtcaacgttataaaaaaatagctatagccattgctcaggttataattttcatctatatttccttcacagctatctttcaaataatccgcaacagtatccttatttctgtttccaaactctgtggtatgctcatacttttcaattttataagtaattccatttatctcaattgtatcatcaactgacacgatatcgtctttgttaacatactccgcatccacatacgtaaccgtagcctggtctactacaccggtgtcaccttctgtctttgaagcctcatcctttacaatacctgattttccctctagcttggcatttgattgtgaacatgctgaaagccccactgccatcatgatcactgccattattgctgtaattttctttttcttcatagtttcttctccttgattgattgctgatgtttaattgttatgataattataaacctgtgatgtgtcatagttgtaaaataaaaaaatccattgcaattttaattattgcaatggatttttgtcacgactttactatcaacctatttatcagaatatctttttattaagtctatttacttatccgataccaccttacagcgcttcttatgaaatgcaattccgtattttatgatattgcatctgccctcttcacgaagtacagcatcatatctgcgtgtatttatctgattcattgcatcttcacaagatttatccaatccttgaaaagacgttgcatatttgacctctatgataattcccgaatcaggatcctccggttttatgataatgtcactgaatccatcccctgattccctgttcgatttgatcagccagttcggattgcttcctctcaaaaggccaagcaaaagaccatggtagaaattttctttctgtctatcgcgagccttagtgtccagaatacttatcatacgatccatgattatattgagctgtctctgaatcttttcagtgtcagcctcaagaatagcctttgacagcactctgatctcatcattgtcctttgctacaacttccttgaaccattcctgtatctgcagaataaaaacttctctgacctctttgtttgggataacaagtttaagtgcataattctcactatccggcaatttcacttcacctacttttgtcaggtatcctgtagtaaaaagtacactccatatattatctatatttttgtctatttcattgtacgtaagttcaagatgaaccactttttcaatagactctccggcaattaagcgctcaacctcatccttggttgtcgaatcagctatatttataaggcgtcttacaaggctgtttccgctactgtttatccagtaagtctgtggtctggcagttggattggcaacaagattgtccacataatttataacatcccaaggacagtatacatccacattaccaaaatgataaccatcataccactcctttgcctcttcaaaatgtgatgccagtccatagtctgcaagaagatttttcacctcatcatccgaaaatccaaactgctcgtcaaatctggcatcaagaatcgataaaactttaaaattatttattccggtaaaaatgctttctttcgagatacgaagacaccctgtaagaattgcaaattgtaaataatcatttgtttttaaaacttttcccaaaatacctctgataagctcgaccatttcatcgtagtaaccgtgctggaatgctttatccagcggtacatcatattcgtctattataaaaatagtattcttgccatagtgtttagtcaaaagctgagataacacttttaatgatgaaataaccacaccatcactcatatgatattttccatctttaatctgtataattccctgatactgctctttttcatttttactgagcttatcactattcattaggaacgaaaatccatttgctatttcacctattatctggacaagtgcatcatatgccctgtcaaacgttaacccgttaacatctttaaatgatataaacacaaccggatattttcccatgtattcattgcataaagctgtattttgtgaaatatacaagccatcaaatatagatttatccgtacctatttcaaaaaaactcttaaacatactcatattaagagtcttaccgaaacgacgcggacgggtaaaaagatttacttctccccaattttgcaggagctgctctataagcttcgttttatctatataataaaagcccgattttcgtattttttcaaaattatctattccaaccggtaattttaatgttctatccatcaaagcctccataaaaaaatccgctataactgttaatcatagtatagcggattattttataaaatacaataattgtgttattgggttctcttttacatcctactgacctttccagcctctatcttcatgacctcatcacacaatatttctatatcctcatgtatgtgactggctaaaataaccagtttcccctgctctttgagatcaagcagtatttctcttatatcacttacgcctatactatcaagtgcattcatcggctcatccagtataagaatgtccggattttccatcatagcctgtgcaagaccaagtctttgtttcattccgagagaatagtgctttactgattttttatcgtccggatccaaaccaacagttctaatacatcttcttatatcatcatctgttatcgttcctcgtattgatgcaagatacttcaaatttttaaaggctgaataatgtggtagaaatccgggattttcaattataaaacctatattttccggaaaatccacatcttttcctactattttcccattgactgacaccgtaccatcagttgtatccatcaatccgcaaatgcatttaagcaacactgtttttcctgaaccgtttcgtcctattattccatatattttcccggattcaaattccatacataccttgtccaatactaaatgctttttaaacttaaccgtaacatcatccaatttaatcaaacttttattttccatttttcaacctctttaccagttttcccttatgatttgaaacaatgcataaagttcccagcccaattagcgttatgcaaaagaacctaaatgtatatccaagattgagtccccattttgccgcatatccataatacagctctaactgagacaaactcataggtgaaaacttatacgcataacccatccaatcatttgctatacacacatccagcaccgataatataataccaataacagttcctacacccttaccggttattttattgccacaatatatcaccagtcccagccataacacactgcaaaattcgagtataatacttattaccagtgcagaaagaggtgtgtaatttgctattatatttggagacaccgctaattgtatgccatactgtgttcctgcgttagttttacctaatgttccccatattttaccccattctccggaaaaatctattcgggttatatatggaattatgcttgcagcaaaaatacctgcaacatatataagtgtcattttaataatatatatgacttgtccaagtccccatgccgtttttccggaacgtgtgaccatataccgatatgtctcattttcatatggcgcatttccgaaaataataatcgcacatgctgctattataaactgtactctatagttgtttataacaaatacaaaagcatacggtgttacttttacattaacaatactgctaaaagatgcaatattggtaagtgattccattacatatatcatagccacaaatattgcaatcggaattcttatattctcatataacatacggagattatatcttgatacccggtttgctttaataaatagttccactttttaagccctccttcatttttccaacaaaaaaagcacctataagtgtgacaattgtaagtgatatggcaatagctataagcaacgtcaatccacttgattttataactacctgccctataagaatcatatccggtctaaccatatcaggtacccttattatctgaaatatccgcaccagcacatagcttcccaaaaaaggagagagaagtactaccataaaatcgcttgtatacaaagatacacaaagagccagacttgaccatataacaccacgacaaaatgccaatatactcaacgtcagtatatataactgcggataatatacagcgctccattcatgaaaataatctgatactactgctccctcaaactcatctcctgcaataggaaatctcattgcaagcattaaaaacaacaatacagttccacatactgcaacaaatcctccggatatagcactaacgataaattttgcaaatatatatctgttttttccttctctggaaacaatataggaaacagctttattatttcgttcctgacacaagcttacagaaaatggcaatgctgtaaataccggcagcatataatgggtacacattccaccaaaagcagcattggagaaaaaatatcctacatatccctgtccgtttcttaagccggctatcaaatcgttaaatgaatcaaagcatattgaaaaaataatacctgctatcgcaattataagtcctgcatttattgtcctgccaaattctgccctaatgactttattcatgctatttcatctcccgtaattgcatttattctaattgtatatccaccagcttcagcgccatttccatttacttcaaaatcaagacaccatacaggaataagttttatatccgtaaatgaatcattctgcaaaagtgggaaatattccatccatatattagtagctttatattcatcagtaagtatcacgtctccgaatttcttatttaaagcctctgtaattcccttttctccgataatatcaacatttgcattacatacatcaggctcctccataattcctgatacaaaaactgattctattcctctatttgatatcataacctcaatgtttacaggctgtgtaatcagcacatctcttgtctgctgcaatatcggatcatcatttgcatacacctgcagaccgtctatctttattccatatgtaaaacaatagatttctgtatctgtcccaaatgtcatgctctgctgtttttttgcacttagaaggtctttataatcagaatcctgttccatattactttgtatattgtttaaatcagcactattaaatgccgtaatattctctttaccaagctcgcccggtattcccattttatcagtcagttcttttacctgtgcccttgcctcggttattgattcaaactgtagctccttagtttctgcaagctttttttcatctgcatatccacaaagtaactgcagatatgatgtatcatcatccttagaatagctcattgaacctgcttctccaccaatataggaatcgtcataattaaaccctccggcatcatcttttaccaagtctgattcttttatgtccggatacaaatatgccataatatccttcagattaaaatcttttaatttagtgttatattcatttaactgtgtttcaggcatttgcaaggttgcatcaatatatagattttcatcaattttcttatttattatttctttgcttcctgttttttcagtatcttgagaattaatttctgtattatatttttttgtattgtttatttcattactattgtttgaagatgtacatccagctagtgtcagacctaatccacatgtaactgcgcatactttaattagtgtttttttattcatttatatcagtttccttcttataacctgtaaagaccaaggcataatctgccttggtcttgataatgcctaatatgttactcttcctataacattcaattgactacttgatgtactgcaatcatctttctttcctctcatataatacaatgttgacttcttggcactttttgtatatgcatatgatcgcgatgtttcctgagacgtatgctttacataattactcattgtagcattgtctgctgctcttcttattcttgttccaaatacattattagaatatatactactgctgtttatagtcagataatatctttgctctgtatcattctttgttccggaattacttgaaacgaatccctcaggactatagaatgtaaaattgtatcctacagtatttgccattgttggaactgcacttgacgcaattatcattacggctgtcaatgctgtaattattttcttcttcataaatttctcctttgcgtttaaaatctcattaataagttacataacaataattattgttgttcgaagttgatgacaatttcaattatcttcatctttctatttttttcaatactatttacatgagacgacattttttagtcatttctggtctattttaatataatagatatcattgatatttaataatatcattctctttactatgatagattagaaatttttattaagtaaaaatattcactacaaagcgaaagaatccgttgcaactgtgataattgcaacggactcttatataattacatagacagtttataatcattttcattaaaaatcatattatgacaaattgccactaattgtaataattccgcaagtattattccactctctataaacactgtataatatctatatcctattatccataaaactcctactacaccaaatatcacccccacaataaatatcgttacttttttacagaattttttgtcattatcgtccagccttttgttaactgaatctataggactaaacaccataagcaatatagttgctgcaatatacatgatatttactataaatatattttttatgtattttcctatcagtaatgttactataattacaatacttgataacaccaaacattttttgaagctatccgcatgatacccaccggaaaactttcttatcagtataaaaggcataatcatagctatcgcttcggttatcattcccaaaaaagctcctattaccgaagcaaaaacaatcggatataggagcgagaacaaacaatgaactgcatatgcatacagttcacgttcgtcagtggtaatagctttctgtaaaattaaccaatctgctattttatcactcatattatttagttttccttttaaattttgataatccttttggactttcaggttcatacatcacaccacaggatgctgagtttgcttctattctaagcatcgtatcaagtgtacctttgacatgtgaaataatgttttttcttctgtctgtcgcaatcttcattagttgcctccttttgtaaatattcatcaacttctacttgccatcatcttctcataaatgatgataaggctttttttataataaatctatattgtttactctaaacagcatttttctcttaaaattgtagtaatatggctaatatttgtcgtttttacactgtcccgcagattttttcattcatgcaattataaattatctatattacagaatatatctgcattactttgttcattattatttaaataactgctaccatttacataaaacatgaaaggaattaatgatattggattttgattacattactatgggacaatataatggtctcataaattaagacactttttcggacaatttataatgaatctgatatactaaaatcagtaacaaagaaaggattcataaaaatgtccagacaaagaagaaatttcagtgccaaatttaaatcagaccttgtaatcgaactacttaagggtgagaaagatctcaatacccttgctgttgaaaataatatccagccgaatctgctccgcaactggaaaaaagaattcctcgacaatgcttctgctgtatttgatgacaagcgtgaggataacctcaaagaaaagcttgctgaagaacgtaaggaaaaggcggagtatgccaaaaaggttggtcagttaaccatgcaggttgattggctcaaaaaaaaatctgaagaaatttgtggaccagactacgagagtaagtttagtccaaaaccttttgacgactaaagaaatcccggcttctgtcggcgcaaaactgcttgatatcaatcgtacaagtatttattacaaaggcacgcctacatccgatgaagaactggcttgtaaagagattatcgatcatctccatacagataacccatcctggggtgcaagacaaatgtccgcccaactgaaggctagaggatatcatgtgggacgtcgacaaacacgacgttatatgaatgaaatggatatttatccaatctatcctaagatgaacctttccaagcgtatgcaacaggccaaggtatgtccttatctgctccgtaatgctatcatagataagccaaatcaggcatggtctattgacattacatatattccaatcaagcgaggttttctatatttgacagctgttattgattggcacagtcgttgcatcgttggctgggaagtagatgatacgcttgataccagaatggtcattaatgctttaaaaaaggcattcaaagtagcaaaaccgcagatattgaattctgatcagggttgccagtttacaagtcagcagtacattgattttgtaaaggtaaacggcatccggcaaagcatggatggcaaaagccgctgggcagataacatcatgattgagcgttggttccgcagcttcaaatatgaagaagcttatctgacacaatacaataacatcaaagaagccagaactgccatcggacagtatatccacacttacaactttgagcggcgtcattctgcacttgattataagacaccggctgaatgctactatccggcaatgctgttgccatatgtagcttagcataaatgggactggggaaggttcaactacttcccctatgttctctgtaacttatcaaccatatcagttcattataaaaatctcagatttttgtcttgacaactgagccactatacaacgcattaagcagcgtcgtaaagaattaaatatgacacaagcagattttgctgaaaaattaggtatctctcaaaatcacatttctgcgattgaatgcggctctcagcatctaagctttgagctttttgtttctatatgtaatacattatctataaatcctgattatttaataaacggatgtacacatctctctaacactccacttcaagtgatggataatcttactctttgtgatgatacttccgttgagcttacacgcagatttacagaactgctggttgagctttatccgaataaatcaaaccaaaaatagcttatttatgtcttttcgtaccgtcttcttgccttaattctcatactcttctataatgatatcaacaaccatgtttttataggagattttttaatgagaatacttatttgtgacgatgatttatctatcacgcagtcactatcccaaataatcaaaacatatttcaacaaaaagaaagtaaataatctcgatattataacctttaatgatggggacagccttctttctgataaatcccaaaaagatatcgtctttttagatgtggaaatgcccggttttgacggcatctatgtaggaaatgaactaaaaaagcagaatgaatccgttattatttttatagtgacatcttacctcgaatatctggatgccgccatgagattccatgtattcagatacttatctaagccaatagataaacaacggttattccaaaatttagatgatgcacttgagctatactattctatcaatcaaaaaatcgctgttgaaacaaaatccggagttacgtctgttttgacttgcgatatcgtatatgtggaagcaaagggtagaaaagttatagtacacacttctacggctgatttggattccactcagacacttcaattttggatagatcatctgccacaggctaccttttttcagtctcaccgcagctatattgttaatatggctatggtaacaagctttgatcacgagctgatatacctttgtgatggtcagttcaccgcatatttaacaagaagaaaattcaccgaatttaagaaagcatatttgatgtttatggaaagtaagaggtaagtattatgaatactacaatttattattttttaatttatattgcagaagctctgatttgtattcaatatacttctaatatattttcagatcgcttttcccattttaaaacttttatcgcaatttttattttatactcaacattattcataatttcacttttacaaaatccatatattaatgtcatagttttttttatttttcatatattcattttctgctgcttatttcaaaccacaaagttaaatgctgtttttcactcacttatccttaccattacaatgatctttacagaactcattgttcttactatttattcaaatataagtgtgcatttttataccgaaatttatatacatcacattactctcgtaatggctataatcagcaaattactatattttatcatcacattttttatatcacataccttgttaaaaaatagcaacaataccataccattttcttctagagaatgttttctcttatgtataattccaatattatcattatggatatcttttacttttatacatttgtgtcttacaactccattgaaaaacaaacttgatgcaatgataagtataagcatgctttttattctacttattaatattctcatttttggactttttgaacatattaagcaaaaaaattccgaaatagcagagctcacacttcagaaccagcgtgatgccgactctgtagaatactacaaagccctcgtgtcacaggatgagaaacaaaaagttctcattcatgacatcaaaaagcatctcaatgccatagcctcactgaacgaacagcacgattctgaaaaaatcgcagcataccttacccacgtactcggttcttctgagttaaagcactccgtgcgggtatgcgataatgaccttttaaacgcactgctctgccgttaccagaaaatatgtcttacgaaaaagattgcgctgcatattgatataagaagtaagtgtattgatttcgtgacatatgatgatctcagtgtacttttcggtaatctcatggataatgctgtagaatcagccgaaaaaacagttaatccttttatagaactcaatgtttttcataaagagaacaataacatgaccattatcacgctcattgattcctgccgcgtaaatcctattgataaaaatggcaaccttttaccaactaaaaaaccgaatccacagtttcatggattcggtatgcgtagtatagaaaatattgttaagaagtataatggtgaaatgactttttactttgatgatcctaccaagacattccatacgattattatgcttcggcactgaaagctgtttcttttaacgattttttatcatctggagcaaatattcacagacatcaaagctctttgcttcttgttctgtttcccgcttctttaatgaatcatatatttgctccaataaataatcagcattcacttttttgtttacaaagctattttcatcagtagaagccattccataaccggcatctgctttcattgttttataggcagaataattatttatcgaattaggcgcagttcttcctttataaccctcatatgacataaacgcgaacatttccagatccgatgcattcgatgtatcaacatcatttacatgcacatgatatacttttctgttatcaccatgtccatatgctacttgaacaacaggatcatcctcctttgatgttttcacatatgaagctaaaactatctgactttctgtatcagacagcccaaaacttgtcattccgatatttttcagcttatcatttggaatttccttatccggtgacacctgttcaactgcatttttattatttaccaatttattgtaaagagaactgttattttccgacaacatattcatgtatatttcagcaagttcactctgcctctccccacatttatttatggagttttgctcactatttcctatttcgaactctatatccattttatcgcctgttgacttcttattataatttgaagtatatgccattgaaatatttgttcccacaccgtttaacatatattcctcctatctgttttaccaataatattacacttttaataattagattcattgcaattaaattcttgccaaaagttccgcaggtgtaagtgccataacctcactttgcgtgaagtctttaatgttgcgcgtaataatatagtctgcatgaacatattcagcagttgcactttgtatggcatcttcaaaatctttccacttcatatttacagccatctcaagcacaactgaactaaaatcagcaaactcaaaaataagttttaacttgcggaatacatcttctatctgctctgaagtcatttgttttctcatgatatacataatatttgcataagttaatgtagatatatatccctttgcctgttcagtttcacaaagtttccaaattatagatgattccttcacaaaatctgagcgacttagtaaaacatcaagtataatgttagtatcaatcaacaaaaccatatttttccctcatactttcggtttttatctcatctaaattaccattatcctgaagtattcctgttagagaatccgtcaaatatgatactgcggcatccttaggaataaatcttcccacttcatgaccattctttgtaacaatgatttcatgtcctgacataacaagattcaaatatctcccaaaattgttctgcatttctgttgcagttgcagttgctgttgctgtattcatatgccttcctcctatccatttcttttttagctaattatattataacgttaattagctattttttcaagatatatccccgttgtaacattattcttgatattttttgctgtatttgtaacataattccgtacatttttccaacattgaattttattttcaaaaattaaaaaaattaaaaaacactgtccgtagacagtacacataatctcatgttgcccacttccatcactcctccaaatctgttatactgattatataaaaatgaattggagatgggacaatgggtatttattttaatccgggaaatggcagctttacaaaagacaaaaacagtcagctatatattgacaaaaccggtctgattgaatatttaaatagagttatctgtacaaatgccaactgcataagtgtcagccatgccagaaggttcggtaaatcccacgctgcaggaatgattgatgcatactacagcagaggctgcgattcatcagagctttttgcagattctgaaattgcagctaaggacagctatgctgtacatttaaataaatacaatgtcatacacattgatgtatcatcattttgggacgcttacaaagataatgtgatagaaaaaattcaggaatatatttatgacgaacttaaacaggtatatggcaatcagatagattataccaagatgatcagtgctgtactcatgtccgtctacaacatttccggtattccatttgttataataattgatgaatgggattgtgtaatccgaaatggtggaaataaaacactggttcacagctatcttcagtttcttcatttgttatttaagagcgaagagtcaaaaacttttttagctttggcatatatcaccggtattctgccaatcaaaaaaattaaagatgaatcagctctgaacaacttccgtgagtttacaatgttgaaatcgaaacaattgaccagatattttggttttacagaggatgaagttaaaaagctgtgcatcacatatgatatggattttgaatcaataaaagcatggtataacggatatctgatagacgggcttcatatgtataaccctaattccgttgttcaggctatgctagatcatgactatgatttttactggaaaaatacatcctcgtttgaatcaatcaacacatttatcaccatgaactacgccggtttaaaggatgatgtgctcgccatgctttccggcgataaaatcagagttaatgtaaataccttccaaaatgaccttactacagttgcttcaaaggatgatgcacttacagctttaattcatttaggttatctggcttatgatgccaacaaaaaaatggcatatatacctaattatgaagttgctgctgcatatgatcttgcattacagaccggttcatggagtgaagtagccaactccatttcaaaatgtgatgaattattagatgctaccctaaatgaagatgctgataaagtcgctgaattggtagaaattgcacatgaaacatatacatccgttcttaaatacaacgacgaaaattctttaagctgtgctctcacaatggcatattttactgcaaatgcatattacaatattgtcagagaatttccagccggcaaaggttttgctgatcttgtttttattccaagagcgaatgcctgtggcagacctgcaatagtaattgaacttaagtacaatgcttccgctgattctgccatatcacagattaaaaaccgcagatatcacggagccttatcaggatacagcaatcagatcttacttgtcggaattaactacagcaacacatctgataataaaaagcatacatgtataattgaaagtattaataacctcgattaacataaagaataacacaagcggactgacgaagcagcccgcttgctttagtgtaataattatccttcaatagaaatctatttctacttatgcctaaatatatatctcactacttccgcattcatggtcactactgtttcctacactgattcgaagttgcattccgctactaacgatttccatatttttatcaaagtaagaaaactcttctgaatcaatagagaaatccacactcttagcttctcccggatccagaaaaaccttctgaaaacggacaagttccttcttcggtcgtaccacagatgtttgtaatgtttcataatagcactgaacaacctctgcccctgtaactttacctgtgttacttacattacaatggacatgcactcttttgtcctgtcctatcttgacttcaacatccgaaatatcaaattctgtataggacaatccaaaaccaaaaggatataatggtgaattaggaatatccatatatctgcttgtgaaacggttctctagattatcctctgtaagcacatgtccggtttttatatcccagtaacttatcggcacctgtccaacgcaccatggaatacttacagccagctttccggaaggattgatcatgccatatacaagatctactattccctctgcccccatggttccgggtctccatgccatgatgacggctttggatttttctgagattcttcgcagatccagtggtcttcctgagattatcactgtcacgatattatccgtgcgttttactattttttcaaaaagcctctgctgctcttccggtaaagtcagaaatgctctgctggcagcctctccggactgagattcatgttctccaagtacacatacaaccgtatcttcccggtttatcgtttccagccactgctcatctatttcttcatccgaatcaaccggtttcacttgccagatcctgcattcttcctcagaaagcattctgcatccaggaatacataccccattaatcttcttatcttgaagaatatcttcgattgtctcaacaggctcatgctcaccaaagattgcccaacggctcaggaattcctttgatgtcacataaggtcctgcccagataactttctgtttctggctcaaaggcagaattttttcatttttcaaaaggacgtagctttcgctggccatctgatatgcctttgtccggttatactgagtgaggtttccactctttccaattcctgcaaaaggattttcaaaaagccccagctgattcttcatcatcaaaaccctgaatgcactttcatcgataaaagactccggaatctgcccgtttttcaccagttcttctaaacgaaacatataagcaggactcatcatatctatgtccactcccgcttctatcgcctgagacgccgcttcatccatattggctgccacaccctgttccttcagctgcccaatagagccccaatctgagatcactgtaccatcaaagccttctttatcccgcaatagatctctgagaagttctttatttccgctgattggttttcggtctattgcattaaatgcggtcataaccatagcaggctttgccttcaacgccatgcggaaaggttttacatactgttccagaaatgtccgttgagatatttcaacatcgttgtattccctgcctgcattgaccgccccgtaacctgcaaaatgtttcagacatgctgcgattccttcatcgtttttctgctgatagccatctaccatggcctcccccatgactccattcacatatggatcttcgccaaaagactccattatcctgccccaccggggatcccttgaaacatcaatcataggagaaaatgttgccttaagtccttcggatgaggcctctgaggcagctattgacgctgcctcagacaccagttccggattaaatgaacaagcctgtcccagtggaattggaaaaattgtcctacatccatggatcacatctgccataaagagtagtgggatatgatgaggatgctgttccatatatttactctgaatatcacatattttttctttaccaatcactcccagcacggaacctgaatactgaatgatccattccggcggtaattgttcgtcaacaacacctgtaagcactgcctctttgtcaaaatatacaccggtaagctgtaccatctgtcctattttttcctgcaaagacatttctgacagcaattgctgtaatttatttatttccatgattactccttatgtttgaactgttgtaactgtataggtcaaatcgccttttaatcaaaataaattgtcttaccactttttgcagactcatagattgcttccagtacacgggtaacaactgcagcctgtgcaggttttactatctgctcagctccgtcagcaacgatatggtagaacagttcctgttcataatcccctgctggtttttcttctcctgagaagaatgctactccttcaccggataatgccggcttctctactacctgtttattgtgatggatgtagttgattcgcaggccatctttcatatctgctccggcttttgttccgcacagacttgtcttggcctcatcaacctccagtgtgttcagtgcccaggcagcttcgagttcaatcaccgcaccgtttttcatacggatgaatccgaaagcggaatcttctacgcaaaactcctcaggatcccagttgccaaaagcatttccctggttggtctgatcagccagtttgcggaatgtttgtcctgttacagactctacttcataattgtccatcatccataatgtcagatccaatgcatgggttccgatatcgatcagtggaccgcctccctgttcttcctcatttaagaatacaccccaggtaggaactgctcttcttctgagtgcgtgagctttcgcaaaatagatttctcccagttcatccgccttgcacatttctttcaggtacagggaatctgaacgataacggttctgatatccgatgttcaggactctacctgttttctctgcagtctccaccattttctgtgcctcagcataattctttgccattggcttttcacacataacatcttttcctgcttccatggctgcgatagagatttctgcatgggagcggttcggtgtagttacatatacaacatccaggtcctctttgataagcaccttatagtcttcgaatacttttgcatcttctgtgccatattcttcctttgctttctctgcacgttccctgacgatgtcacagaaagctacaatctcataaagaccactttttttcatagctggaaggtgttttccgttggcgattcctccgcatcctacgattcctgcttttaattttctcatggtattatctcctttactaaatcacgtactgttccagatatctcttgctgatgatcaaggaattctcaaccttctccttggaatcctcaaaagccttatcctcgatctcgatacaggtatagccatcatatccgatgtctgtaagcgctgacacatattttccccagtccacatctccaagtccagggattttcggtgacatatattccagaggatatgccatgatgccgcaggattccagcttgtctttatatatctttatatccttgtaatggacatggaagatcttatccttgaattcgtaaagcgggcggatataatcgatcatctgccagataaagtgggatggatcatagttgatgcccagatggtcactgtccaggatccggaatacttctctccagattggcggtgttgtcatcaggttctgtcctcccggccactgttccttgccaaaaagcatcggacagttctcgatggcgatcttcacgtcacattcctctgccagttttatgataggtggccatatctcttttaccagttccagattttcctgtatatttttggtctggtcccttccgataaatgtcgtgaccatgcccacacctaattttttacttgcaagaatcacctgtttcaggtgttccacagcggttgcgcttttctctttatctgccaccatcacgtttggataataggccagtgccgatatctccactcctgattttttagcatattctacaatatgctctgcatatgcgtcatcctggttaacccgttctgcatcaatatggcttacccctgcatatcttctttctgctttttcctgtggccagcatgccacttccacacattcaaatccctgtccggatgcaaagtccatcatttcttcataggtccagctgtcaaggatggatgtgataaacccaagtttcatagaaataccctcctgtttcttctgtctctgttatatctttgttatttctcccatggagttggtgtgaactctccgcctctgcaccatttcagatagttcagtgcgtgaagctgtcctgtcatctccagttctccccggtataccggatcgtgatatccttcgatacagatatcgtcctcatatccgttgcttcttaagatagaaatgatatctctccagtttgtgtcaccaaatcccggcatacgatgccatacaaaaggaactgctccggagataccgccgtgccttactgcatcccagtcaatggtcgcatcttttccatgtacatggactatctttttgcaccattttctcagctctgtcacaggatcgatcaactgtaccatctggtgggtcggctcccattcaagtccgaagttatcattctttacttcctcaaacatgacttcccaggctttcgggttgaaaccgatgttgcaggtggcatgttcccaggttccatccataagacagttttcgatacccagctttacgcccttttcttctgcaagttctgccagttcacggaacacttttccgaactcttcgtacgcggattctaccggttttccttcccaggctcctgcaaaggtgcttacatgggtagctccgaatttttcagcagtgcaaattaccttttccaatgtctttctgtgctctggatactggattggattacagtagtatccgagtgtagtgatctttgaatctgtaccggcaagaatctgttctgtgctcagggccagtttatcaagatctgttccttccagtgacatatggaaattgagggaaaatgtttcgaaaccttttccaacaaatcctttcaaccattcttctgctacggggcctggtacgcaggttccgattttgatctgtttcatacttatttcctcctgttctgttacatgcactctcaaagaacatgtacaactgtcttttatttttatgttataactactcaatgcctttcctgttacacctggtcctgaaattcgattacctgttttgtctctgccgcctggaagattgcctccatcaacttcatgacacgcatcacctggaacagcttgatctccggctctgctccatctcggattactgcaaccacatttctgtggaaatcagcgatatctccggacacctttggtaaatcctcttttacaatagtatcttcccgtctcggtgccatggtctttgtcaggccagctgctgtcttaaccggtattaccgtctcttctgtcttaccggtcttacgtataatctcaccggttaactgccagtccctgattactgcggtaccgtctttacccagtacataccatcttggcagtgatatataattgttggtgccgacttccaccaggacttctgttccgccttcaaaggtcagaatagcagtgaacccatcgtccacttcctggtttgtgatattggtaagtgacgcgtataccgtctcgatctttctatctccgtacatatataaaatctgatccagcaggtgtacaccccagtccaggaccattccgcccccatgtaccttttcttttctccagtccccagggattcctcttgaaccatggacacggctctcgatccggaaaacatgccccagtttctgctcctctaccagttttttgatgatcaggaaatcatcatcccaacgtctattctggtgcacggtgaaaagttttcctgtctctttggctaccttttccatttccagcaggtcagcggaagataatgtcaccggtttttccgatatcacgttttttcctgcatgcattgcacggatagcgataggcttgtggcagtcatttggagtggcaatcagaaccacatcgatgtccgaatctgccagcatggcttcttctgtttcatatacagaaaaccccttcgctttcgcttcttctctcttttcttccttgatgtcatagataccaccaattacagcttctggaacatttgaaagaatctcggtatgccatctgcccataccgccatatccgattagtccgtaaactactttgttttctctcattttatacctccatcgtaaaaacagcggctgaagaacaccatcagccgctgtcttttttacttacttaattcatcgttgatttctttgagaatctggtcgccaccctgattcttccagttttcaacgaaagtatcgaattcgctgatatctgcttttcccataatgatctttgagaatgtttcttcttccatttttttaaggtttgcccatttggcctccatggtttttgtctgaccgttatatgcattgtaaaccggtacatatttatcatttactaacggagatccaccaaccaaaagtgacacaagtcttggaagattagttttggcaatgtcactgtccagattccatttgtccaggctgaaatcatcataaggttcttttttcagttccttaactgcttccatatcattctttaacagtttatgttttgagaaatcaacatcatccattgtaatctcacctgcaagatatttttccagagtctcagtggatacttcaatctcatctgcattatcgtagccattatacaaaggataaaaatccgcagtacccatttctgtggaggtaataccatctactacccactgctgctcatttttgatcagatagttaacaatcttaaatgcagcctccgggttcttgcagcttttgcttgctactacatatttacttgtaggatttggcatatgagcgtagtaattcccgtcctcagacagtggtgtaaaatatgctctccaatccgcttcgcctgcaagtgtagtatctgacaccgtataaccagaccaccatggtccaaagaagataccaacttttccggacaaaagaggttccttgctgtcgcttcttacaagcatttccggatcgatcagcttatttgtatacagttttgagattttttcaagtgcctctctggtttccggctgaatagaaccatattctacagttccatcctcatcctgcagccagtactgtggataagactggaagctgctaaacaatggatccagtccaaactggtttgctccaattgcattcatgtgatctgaattgctcggtccaagaattccaatggtatcagcttctccgttaccatccggatcctgggttacgaatgcctctgctactgctgccatttcatcccaggttcttggaacctccagtccaagattatccagccagtcctgacgaatccacatttcgttcgcttctcctcccatcatactcggagccgggattgccattatctctcccttatcatttgagatacattttttcagctcttctccaccggattccacatatgctttcagtgcatcagaagcatagtcatcaaaatactgatcaagcggctggatcatatcatatttcagaagtgccctgtactgtgttgcatttacgttcatcaattccggaattgtgttacttccgatacacagattcattttttcatcatagtctgtagatgatgcgacccagtcgtatgcaacctcaatattaaggtcttctttcaaaagtcgtgtataggaattgtcatcatagctcattccgtcaggaatcttagcatttgaattcattgaaccgcccagatggacagttactgtctccggatattttgacagtgggagatcttctttggctgttccttctgcctcccctactgcctttttctgtgtgttctcttctgattttccgcatcctgccagtgatgtcacacctaatgccatcgcacatgcaaatgcaatccactgttttttcttcatattttcttcctcctttatccttttactgatcccagtgtaataccttctacaaaaaatctttgcaggaatgggtaaacaatcagtatcggtatcatagctataaatattttcgcagaatctaatgaaagattgtttaatttcatcgcctgcgcaatctgatctacattcattgtagaataatccagggttactaccatctgctggatgtaggtctgcagtggataactgctctgtcttgtacttaaaaccattccctggaagaattcattccagtacataaccatggtgaacagtgcaactgttgcgaccataggttttgccaatggtatgtagatagatatcagagttctccaaggtccgccgccatcgacaaaacacgcctcttccagttctgttggaagatttttaaagaaattcactgcaagtatcacattaaatacctgaaggcctgttcccagtaccagtccaaaaatgttatccatcagatgataatttttcatggtgatataccacggaaccgttcctccgttaaataacatgcagaacacgaatatccacataaagatatttcttttcgggaactgtttttttgttctggataatggatatgctgccataaggatacataccatactgattccggttcccagcaaaactctcttaatagataccagaaacgaaccgaaaaatgcggtctctcccatgatttttttataggagagcaggttgaagccaaccggccaaagtgcaacttttcccgcattgactgcttccctgctgctcaatgacacgcagagaacgtaccataccggcacaatacagatcaaagtaatcgcaatgagaatcacaatatttaaaatatcaaaaatctttgatctcaggcttttattctcaatcatagttatcacctcctaaaacagtttataaccggtaaatttatctgccagccagtagccaaccgtaatcaatacaagactgattacagatttgaataaaccaacggccgttgccagagaatactggagattttgcaaaccggctctgtatacccaagtgtcaataatatcacctgttgagtaaaccaatgggttatacaggttgtaaacctggtcaaatcctgcattcagaatgtttccaagcgacaggatagcaagaagtgctactgttgtcttgatgcccggtaaagtcacatgccagattcttttgaatcgtccgcaaccgtctactgctgcagcttcatacaatgatccatccactcccaggattgctgcaagataaacgactgtattgtagccgaatcctttccagatatccgtaccgatcaccagaggctggaatatctttgcttctccaaaaaagttgaccgcttcgcctccaaaaaattctatgatttggttcaccggtcccgtataaccgaaaatattcagcacaatcttcgcaagaataacccatgacagaaaatacggtaaatatacgattgtctggattggacgcttcagtttcttcagtgccagttcatttaacaacaaagcaaacaccagtggaataataatatttccaatgatcttgccaacggcaataacaactgtgttccgtagaacctgtttaatgtcactcatctgaaacatgtactcaaaattagccagaccaacaaactttgagtggagaatgccctgtcccggattgtaatcctgaaaagccataacaattccaaacattggaacaatgctgaaaaagaacagccacagcaatgcggggattagcatgatgtaatagtgtttcacaaatctttttatgtacattagtaaacctcccttcttttatagatagtttatcctgtaaccatatttttcactagacgatattgttcctgatttcacagcttttttttaaattcaaaaaaaatgtccgaattaaatcgaacatttttttattcttcctatatattctgttggcgtgcatccgtattccttcgaaaatacctttgtaaaataataaaaattgtcatagcccagattcgaggcaatctgtgttatattttctgttccttttgccatcttctgggcagctgcatacatttttctgctgatcacataattatgaaatgtatcaccggtcatctccttaaatctcgtactgaaataacttctgctcattccgatctgtgctgctgcctcttccgacttcagattttcttctatattttcatctgtatacaggatcactcttgcaaacatatagatatcctttgttttatctgtctgcagacatgtctgatacaggttttctttccattgtttcacccattccagcatggaatccacggaagataaggatggaaattccagttcttctcctgtgagtttctggaggctgtggaagctttttatgaaaaccctttcagcagtccgtaactccactcccctggttaactcatacagtctgctgaactcgctgtcattgaagatccatctggtgttcatccacgctttttccaacctttttatgagttcggaatcctcattcctggtttctttttgggaatgattttccttatattttctttccacaagttccagtatccggtcacactcatccccttcaaaacttatcttggatatatagtccaaagctcccagtctcagagcactctgcgcataacggaaatcttcatacatggaaaagactacaaatttcacctccggatattcctttttacacattttcatcaattcaattccatcgatctccggcatgtctatatccgtgaatacaatatccacttcattatccttcagaaattccagcgctttacgaccgttctgaacatcccccacaacttcaaatccgtatttcttccaatccattatggagatcaaaccttttcttgccagtttatcatcgtcaacaactaatactttcatttctccttaccttctttttctgtctcaactcctgtaatttttattttgttccgaagttcttcctgaatcggaatcaaaattgtaattttggttccatatccttttttgcaattgacaaacagattcgtttctccttcataaaaagagtccaacattgcttttacatatcgcagaccgattcctctgtttccatgctgcattttttttacatcgtagtcaaatggttcattgatctgataaatttcctcctgggtcagaccattaccgctgtctaatattgtgatgcccgccagtcccctgatattatcctcaaagacctgaattgtgatcttttcatcatctccaagtccatatcgtatggcattttctaccagtggctgcagtagcatccttaccgtcggctgttccagataacgtccctcttccacattcatctcaatcacaaaatcgtaacgcatctgttccaatgctatgtaatctttcacaatatcgatttctgttcgaagtgttgtctgcattccctcttttcccagattgtaggacaacagtctttttaatcgctgcacaaattccataatattattctgtttgctcattctggccatccactgaacagaatttagtgtattgagcagaaaatgaggattgatctgatacagaagcttctcatattccgtccgctgaatatttttttctttttccacaacatcatcaatcagatttctgatttgttccttcatctgctccacttcgtgcatcaagtcatcaaattccttgatctcatattcctgcctttctccatgtaatgccccatttcctacctggataatctgtttttgtaactgattaagtggtttgcatatcaacctgtacaggtaaataacagaacaggaaaaaataccgaatgttgccagaatgataaccaccagcttcaatctccacatattcatttctttctgatagatattttccggcagtgcaatggcattggcatatccaatggtactgcgatacaccatgattttatatccttcctgatttgttacagcatgtccttcttttttcggtaattccgacaaaatcttttggccctggacaatcaccggattattgctgtactgcacaatgccattttcatccatctccatataggtatatggccatttttctttattaagctgatctgaaacactcatatcaggctccatttctgcataaatatccagcatcttttggttaccaaaagaaactcttcgcatcacggatactaccggtgtctccttaattcccagataggaatcatgcatggcctgaatggtattatcggcacctactaccactttagagattgtctgatatgacgggtccagcaccctgacgttaaaatttccgatcaattctttttgctctttcggatcgtaataagtgatgccaagaagctttgtattcacatatccaagctttatcagttcttctctgagaaatttctgctccaaatatcgatcatagttatcatttgaactcaaatatctttctgtcgcacttccaataagtccatcgggactcatctgattgacaataccgatcatgtcatagtaatcactgtccatctctcgtgtaatctgctccagatatatctgcatactctccttgataccgtcattctgtatcattcggatcgtcatatacgacacgattactactgcaagaatacttgacattgcactgagcagaagaatactcagcatcttctttttaagcgtttgtttccctctgtttttccttctcataccagtttccctactcctgttttacctctttccacgccactgtaaagttatactgaacagttaacaattttatcttattttaataatagataaattttttctgaaagtcaaccaatgataaaatatgatttttccaacgttgaatttttattttcaaaaacacataaaataaccccaaaagccgaatccacactcccatggattcggcttttgtatatacacttctattttctattttgtatgaagctgtcaatcatagcaatcacaccatctacaccgagctttgccacattcaggcacaggtcatagttttctgcctgcccccactcctgtccggtataatatttgtgataggtctttctgttgtcatttgtctcacgcacaacagtctttgcctttctcgctgagactccatgtgtatcagccacagtatcaacgcagaaggcatcattcgctgtcaggaaaactgagacaacatcatctcttccctgaaaggcaaagtttgcacatcgtccctgaatcacatatccctcacagccgtcctcaatcggcagcctgtctataaatgtaagagccctcgccggagtatcatgcagcacattatcctcctccgtctccatcacaatagagtaaagcagggaattaaccggtctctcactgtaaaactcctcatactcatcgtagcagcctgcctctttggcaccggccgcaatagcctctctgtccatgaaatgtaaatgatatttctcagcgactgctctaccgatactatctgcatcgcaaccgcactttctagcaattgtaattatcatataaatatagctcctttctgtaaaaaagccaacgcgcaggaagcgctcagacaaatcaataaaagtttgcaaacaccgatgcaaacaccaccgtaagtattcctgccaccgcgatagcaagagagctcatggcgccctctatctcgccaatctcgatagccttcgctgttccgatggcatgtgatgaagcgccaagcgccagtcccttcgatataggctcagtgattctgaatattttgcaaacaaactctccgagtatatttccaagcacacctgtcacgacgataactgcgacagtgatggtcacatatccgccgagctcctctgatacgcccataccgatagctgtcgtgatagactttggaagcagtgtgacatagtcctcgtgtgaaagccccataagcactgacagcacaagcactgtcacaaggcttgttatgacgcctgccgtgagtcctagcgcgactgctgctatatttttcttgagcagggtccactgctcatagagcggtatcgcaaggcataccgtggccggtgtcagaaaccagctaaggtacgatgcccccttattgtatgtgtcataatccacatctgccacaacaagcactatgatggtcagtactattgaaatgagaagcggattgagtattgcaagcttaaactttttctttaaaagcatacctagcagatatgcaaccagacttactgtgacaccggcaaaaagcgatgtctgaaacaaattatccattatgattatcctctatcttatttattttctccagcatcagccctcttgcgcttctgcatacggattacgagctgtgaaacatgtcctgtagcaatcattacagtaagaagtgccacaaccgtgattacaagcacaggtacaagcaccggcttaagattgccccaggatgacataagtcccactcccgcagggataaacatgacaggcattatctctatcatgaatttgcctgcactccttacagagttaagcggtatcaggcctgtcagcagacctatgaaaagtataaccatgccatatatgctcgccgggacaggcaatggcagtaaatatttgagtatctcacctacaaacgaaatcgcaagtatgatgagaaattgctttaataatttcattttatattgtatctccgttatatatatttcgtgactatttgtaactgtttatctgtgttccctgaccatcattgtacatacaatggcaagcagcacgcttgaagcccatatagcgcgtattcctatgtgcagtgagcacactccgcctatacctgctcctattgcaaatatcagaataattccatagtagtgcgctgtctttttcagtgccccgatatttctgtcacgcagatatattgacaggctctctgtgccgcttcttaggttgccgatgcacatggtgctggcatagccgtagccgtttacctttctgaaggactgcacctgcatagaacagctgaatgatacaagcatggtcgctatcatatcgtacctgtgtggtatgaagccgaccacaaacagtatgattatctctatcatcaccactatctgacgccagtggatgcgctttgccttcttatatctatgcccgattctctctgccacaagcacaccgagtgcaaatgaaaggattgggaaaagatacgatagtcccttcatccattcacctatcatcagatgctggctcatcagcaccacgtttcctgtctgcgcattcgagaacaccttgtttctcacgttgtaggtgtaggcatcctgaaagcctccggaaagtgccagaatcgcactcagcaaaaaggtctctgatgtctgaatccttattttttctttttcagtcattttttcgcctctttttctcatattcgctgttagctgccacaccctcgtgtgacccacagcaattgcatatttacagcaatccacacggtttattattatagaaaaaaagggcggatatttcaatacccgccccaaatatacagtgtattaaattttgcacaatacctaaaatatatattggatatacataatagatatacatcatagctataccagatacttttcttcaaactcagataccggtaccggttttgagaaataatatccctggaactcatgacagcccatcattgtgagcatatcaagctgctttttcgtctccacaccctctgtgatgacgtccatgcctatcttgcctgcaagcgtgatgatactctctaatatatcctgtcccttgacctcgttctcagatttgcgaaggaagcccatatcgattttcagcacatcggcactgatatcctttagcatgttgagtgatgagtaaccgcttccgaaatcatcaatctccaccctgaagcctacgccctgaagcttgtggataatattcatattcttctcaaaatcggtcatcagcgttgtctctgtaatctccagatgcagattggacgctgctatgccatatttattaatcagccctgtaaaggtctcatatatatctataatgtagaagtcctttgtagatatatttacagatatatgatagcttccatagcctttttccttccactctgcaagcttttgcgctgccttctcccatatatagaggtcaagcttgtaaatgagacctgcgttctctaaaatatcaataaaagcatacggtgtcaggatgcctcttgatggatgaacccagcgcaccagcgcttctgcgccctttgcagcaccatcacgtttcacctgtggctgtaagtacatgacaaactcatcattttgcaatgccggctcaaattcaccgagcagacgtctctgctctattgatatctcaagcagatgctcatcatagtatgccacacagcagtcgtaattattctttatggtgtctgccgctatattagccttgtctaccataatgctgacagcctcatccctgtctcttatctcatacacacccatgtatgtatgcagatggaaagaattgcccgaaaactcacgctgcagctcttttattgaatctgccactcttttttcatcaaactcttctcttggcagacacagcgcaaagcggtcattcataagccttgcacaaatggtcctctcagatggattcgatgccatgagcttcgcctgctttatgagcacctgattgcccttctccattccaaatatctcattgatgaatttgaaatcctttatattgctgcaaatcaggtagaaggttgtgtcatgatacttgttcaccatatcgtgcacatcctcatagaactggtcacggttcaaaagtccggtcagactgtcatgcgatgccttgtacttttcctgctcccacgactcatacatctgtgtacggtcattgtatacaaaataatcacatataacgcgattgctctcatcatatatgcgcttgtaggcaatctcaaagtagtgcttttcaccgtttatttcaatatctgttgtctggaaggtcatactgtcccttctgtcatctcccagcttttcaatccactgactatatttactttcataaacagacatattgccgccatgcctgtaaatagcctccatcaggtcattgtaatatatgcacctgccctttctgtcatagcagatgataccattgttcatatcgcggaccacaagagagagcatattttctataagctcattcggcacatatctgtatgtcaggtaatatatgataatagctatagcaccatatataatcatggtgaggtcatatatggagtccgaacctatagtagcaatgtcaaacgaaaagccgataaagataactaccgctatagccccatatgcctccctgtacatgcgcgatgatttgataatcatatacagatatgtaaaaataatcagaatcacaaacgcatatgtgaatataaaatgcagcctgtaccataggctgtcattattgaataccaccttaatattctcagcttttatggattctatatcaaaaatcttattagtccaggtgttctctataagcatatatgtgtccagcaccgcaaatatcatggaagcagcctgcactcccttgaaggtctttacagcacctgtataatactgtgtataaaacataagagcgatgagcatccagtcaaacagagccatagtaagccctttcgcaagtactgtaacagtgtgccccggcacaaatgtaaaaacaaaaaagactatagcgcaggcaaatgtcaacgtctcatatatacacacacttttaccgagtctgtcatgttttttaaaggaacagattgcgcaatgtgcaatcagtattgcttccagcaatactcccagtccatatactatcctcatattcccacctgtcttctatgaccatattactaacctatatagccattgtaactcatttcatgtgtaatgtaaacaaaaaagaggttgtcacaacctcttttttgtaatttattaacatttattattttcctgaagttgctttcagtcgtgtcatggcacgggccagcgaagctcttgagtgataatactcctgaatactctgcttctggcgaagctgctcctcagctctctcctttgcctctcttgcccttgctatatcgatttcctccggatgctcggctgtctcgacaagcagtgtcacacggttgttgactatctctacgaagcccattcccactaccgcgtactcccagttgtcactgccctccggctgaaatctcatctcgccctcatcgacggctatgaccatatcctcatggtgggcgaggatttccttctggccatcgaactcagggactattatggaacgacatcttcctgagtaaaacactctgttagcagctattacctttagataaaatgtatttgttgccatacgatttgtccttccttatgcttttactgctgcatagtctttgctttttccttgacgtcctcgattgttccgacattgaaaaatgcgttctcaggatactcgtccatctcaccatctatgatggccttgaagcccttgatagtatcctctacaggcacatagacaccctggatacctgtgaagttctcggctacgtggaatggctgtgagaggaacttctggatttttcttgctctgtatacaagcaccttgtcctcatctgccagctcctccataccaaggatcgcgatgatatcctgcagctccttgtacttctggagaatctcctgtacctttcgtgctacctgataatgctcctcgcctacgatatcaggctcgaggatacgtgatgtagactcaagtggatctactgccgggtaaataccctgttcaacaatctttcttgaaagaactgttgtggcatccagatgtgcgaaggttgtagccggagccgggtctgtgaggtcatcggctggtacgtatacggcctgtaccgatgttaccgaaccgttctttgtagatgcgattcgctcctgcagctcacccatctcagtagccagtgtaggctgataacctacggctgaaggcatacgtcctaaaagtgctgaaacctctgaacctgcctgtgtgaaacggaatatattatcgatgaaaagcagcacgttctggtgcttctcatccctgaaatactctgccattgtaagtcctgtctcagctacacgcatacgcgctcctggtggctcgttcatctgtccgaacactaaggctgttttttccagaactcctgattccttcatttctgtccagagatcatttccctctcttgaacgctctccgactcctgtaaagattgagtagccgccgtgctctgttgcgatattgctgatgagctcctggatgaggactgtttttcctactccggctcctccgaagagtccgatttttccaccctttgcatatggggcaagaaggtcgatgaccttgatacctgtctcgaggatttcctctgcagggttctgctcctcaaatgttggtggttctctgtggatttcccacttttcttctgtatcaggctgtgctccgccatcgatagcttcaccgagcacgttgaacagtctgccgagagtctgctctccgacaggtgtcttgatgccggcgcctgtggctgttacttccatatctctgtgaagtccctcactggaagcaagcatgatacagcgtactgtattatttccaatatgctgtgcgacttccatcacactttttttgtcaccatttaaaacttctagtgcgtctctgattgccggcaggttctcatcctcgaactctacatcgacaacaggacccataacctggataatttttcctgttttcatcaaaaagcctactttctctttttcttctgcgatttagcaccggctattacctctgtaatctcctgtgtaatcgctgcctgtctggcacggttgtaaagaatgtcaagctctgcaagcatgtccctcgcactgtttgatgcggactgcatcgccatcattctggcgttctgctcacatgaaaatgactctacaagagcaccgtagacaaatccaacaacgtagtttggtacgatacgatccatgactgcctcaggcgatggcttgagtgccagttcctccctcggtatgtctataggaatctgcacagtgaagtctgcctttttcagtggcagaagctgtgacatctgtgtttcctcctgaatcgcatttatcatgctggtatagataatataaacttcgtccagctcgttatgtagatatagctccaaaatttcttctgcaatatttctggcacggttgagtgtcggattctgaactgtgtagtggaactgtttttcaatctcaattccacgctgttcaaaataatgacgtcccagctctccgagtacgaaaagtgaatggttcggatgattctttaagtgctcctcagccattttcaggatattgtggttgtatgagcccgcaagtcctttatcggctgtgattacgatatatccgacctttctgtcctcaggcagcttatcctcgttggtcttgaaatagatgtcctccatatcaggcagatgcctgagtattcggctcatctctgattgcagtgtgaagaaatacggctctgtatctgccagcatctttttggactttttcagcttcgaagaagaaatcatatacatggcatttgtgattttaagcgtatcattgatactttttattcgatcctgtatttccttcgtgtttgccataatactacctgttaccctttatactcttttactgcatccatgattttatttacgagctcttcatcaatggctctgttctcttcgatcttctgtccgatttccggataagaaagatccatgtatgagaggatatcgccctgatatttcttgacctcttttgtctcaattgtgtcaaacacaccatggtttgccatgataagtgtcattacctgctcatgcagtgacagtgggtggcaaagcggctgcttcaaaagctccataagtgcttttccatgtgcaagctgtgcctttgtggcatcgtcaaggtctgatgcaaactgtgtgaagacctccatctccctgtactgtgccaggtcgatacggatgcttcctgatgccttcttcatggcctttgtctgggctgctccaccaactcgggatactgaaagacctacgtttacggccggtctcatacctgcgttgaagaggttgctctctaagaatatctgtccgtccgtgatagatattacgttggtagggatatatgctgatacgtctcctgcctgtgtctcgatgattgggagtgctgtgattgagcctccgccaagctcatcgctcagacggcttgatctctcgagcagtcttgagtgaagatagaatacgtctcccggatatgcctcacgtcccggtgatctctcgagcaacagtgaaagtgctctgtatgctaccgcatgctttgaaaggtcatcatatacgataagtacatccttgccctgatgcatgaaatgctctgccatggctgttcctgcgtatggtgcgatatactgcagtgatgcaggatcgctggctgttgatgaaagcacgattgagtaatccattgcgccgtgttttgtcagagttgacacaatttttgctactgttgatgctttctggccaattgctacatatatacagataacatccttgcccttctggttgatgatggtatctgtggcaattgatgtctttcctgtctgacggtcaccgatgataagctctcgctgtccacgtccgattgggaacattgaatcgattgaaaggattcctgtctcaagtggagtatctactgactttctgtccacgatacccggtgcctcattctcgattggtctgtaatcttcctctttgatatcgccctttccatcaataggctcacctaaggcattgatgattcggccgataaagccttcacctacagggattccggcttttttctttgttcttactactttggttccttcatggattccgtggtctcttccgaaaaggattactccgatttcattctgacggatatcctgaaccattccttttactccattatcgaatactacgatctcaccgtacatggcatggtcgatgccgtatattgtggcgattccgtcgccgacgtagattacctcgccggtctcacggctctcggtatcgaagtcgaaattctctatctcgctctggataatggagattatgtctgttgcactgattgcgcccacaggggtcacctcctggtcaattttctttcaagctcacgaagctttccttcgtagcttctgtcatactctgtattaagagtcttaatcacatatccacctaaaagtgtttcgtccactttctgtgtaagggatatttcatattccggatatttgctttgtagcagcgccttggcgtcatttgcttcctcgtcggttgcggcctctgcactgataagctcagctcttatgatatggtttttctcatcccagtatctgtaatatgcctcaaagatttcattcatttcagcggcatatccaagctttaccatttcctttatgaagcttgtgataagctttggctcactctcaaatccgtataccttttctatgatgtcatactttttggtcagcggtataagtggatttgcgagcgtctgtgcaagcttttctgtcacaaagtatactctctgtgcttcctccacatcacgacgctctacagccagcctgtacaaaactattgcattatttactgctgcctgtgtcattagcttcacctgtctttacaatctttctcgctgctaagatggcaagttttgcaatttcagcctcagcggcctttgttgccttatcctgctcgctagcaatgtccgcttttgctttttcaagcatactgtctgcttcctgtctggttctctcaagagccttctcctgctcagcctcagctcttgctctggcatcgagtattatctggtctgcctgagtctttgcactctcgagcttctttttatagtcgctctttaagctttctgcatcgtcctgactcttctttgcttccgagaactgcttctgaatcatttcgtctctctgattgatcacgcccatcacgcggtcaaagaggaatttcttaaatatccagtacaggaaaagcagattgactactgtccatattatgttccatggatcaatttttaacattgctctaccttcctttctgtttcatctggttgtaactgtcagttacgctgcctgattatttaaggaagaggatgataagtaatgcgataacgaaaccgtaaatagctgttgcctctgcaagggcacatcctaaaagaagtgatttagagattttgctctcagcctccggctgtcttgcgattgcgtctactgcgctgcttgttgccttaccgattccaagtccggctccgattcctgttaatactgcgattccagctccgattgctactaataatgttgatgacataatgtgttctccttttcttgcttatatgctttcttttggttagcaattattttgtttcttttgtaagcgaggttacattttccatgcttacgatgtgaaattaaatgatgtggtgtttcatgcctcatcaggtcttcttactcggttgcctccttgatgaaaagtcctgtcaggaatacaaatacatatgcctgtataagtccatcaaagatatcaaaataacaactgaatactgccgggacgattgccgggacgaccatctttaaaagctccatgattacgaatgaaccaaggacgtttccaaataatcgcatacacagcgataatggtttgataaagatctcaatgatattgataggtagtattaccggcattggctctgcaaagcttttaagccaccttttggtgccctttgccctgattcctgccacctcgataagaactatgctcattacagcgagtgctgcggtgacgttcatatcctttgtcggcggtttgaagccaagcaagcctatcaggtttgctattcctatatagatgattactgttgccagatatggtatgtaatcctttcctttttctccgagtgtctcactgaagaaatcattaaggaatttgactcctgcctctacggctacctgtctgcgtccgggattttcaactgaaagatttctgccgagaaaaaagcacagtaaaaataccgctgccatgattatccatgtgactactaccgactcgtatatgggtatgcctccgaatatcggtatcttgaataccacgtcacaattgagttcctctaacagtccatctaccagagcatccatctgcgttacctcctttcttttttgctatatgaaatttgatacgcaaattgtttcttaataactcaagatgtgttttgtctgacctttgatgtttgtttggtcttgatttaataagaagcaactatcgttgtacttgattttagtcacatcgttttataaagtcaacgtttcgtttttatattgtttggctggcaaagtttcacattttttagttagctttttatacattttcaacaatttatgtttttatttttgtgcagtttttctattgcgttttggggacgtttagatttattttatttttatttgcgttttattaaaaatttccaaataatttgggaagaatttccctttttttcacagtttttcacaattcatttgacttgctgtgggggattggctatagtacggaacccgggcggcaggcactcacaggctctggtgggctacgctacgctgccaagattctgtacgaaattatgcttgcagggtttctttgcttgacgaaaccggcttttatgcgccgtccatggcgcatactaccggtcacaaaaagcgtgaccagtagcaatttcagccatttttaatgcatcagaagatgcatggggctgaaattgcataaaatataggttatggcgcatagcttgacagcatagtgtcaagcttgcgttttcataaaagtgctatttgatatgtttgcccagccgtccttggctgggcatttctgtgcttcgtgggcataatttctacagtatctaggcagcttcgctattcgccctcccgagcctgtgtgtgcctgccgcccgtgttcctcacgctgtggctctatttaccttcttgtcgctttgcccacggctattgccgtgggcaaagctctgtgcatgtttgttattcttttacgctttcccctcggctgttgccgtgggctcgctctgtgcgtgctgattatttgtgtatgctttgcccggtctccgccgggcttgcttggttttgctcgctctccgcgagggtttgctcaggcctagcccagcatcacatcgagtgtcatcatgaggcagaagcccaccataaatgctatggtggcgcggtttgagtgacctccttctgacatttccggcacgagttcttctatgactacatatatcatggctccggcggcgaagcttagcaggtacggcatcaccggctctattattccgatggcaagtatcgtaagtattcccgctatcggctcgactattcccgacaatactccgtatacaaaggctctaagctttgagcttcctgtgctatgtaatggcatggatatgattgcgccctccgggaagttctgtatggctattccgattgccagtgaaagggctgctgccctcgtgatagtggtggttcctgatatccagcttgcgtagagcactccgactgccatgccctccggtatattatgtaatgtaactgcaagcaccatcattgtctgtctgcttaaattgctctttggaccctcaactgaattatcgagatgcatatgtggtgtgattgtatccagtatcaataggaaaaacattccaagcataaagcctgctactgccgggacgaactgcatttttccaaggctctgtgactgctcaagtgccggaatcagaagactccagactgatgccgcaatcattacgcctgctgcaaagccactgagcatttttgtggtctttacggaaagctcatttttcataaaaagtacacatgccgcaccgagcgacgtgcctataaatggtattaataaacctaatatggttgatgtaatcatggttgcctcctattctgctgttctgcggtttttctattttacacaaacttcccatatataaaactatatttaccggagagtatacagttgttccgaagaaaaaaatatgaggaatacactgtatgctaggccggtatcacaaaataaaatatgggaagtttgaatattttattattccacatattatttcttatatcgtttcgtatatcattttgcagtaactgaatattcaaaaccacttaatgtaaaacagctgtatgtaattagtcttctctaacccgattacagtttaatacacctatataatttcgtcaaccggcttctgtgagccttaatcgttactgttcacacctagcagtgtgaccagcaacgagtacaagctactccatagcttagatacagttgagttatacttctttgcacagcaatgccctgacaaaacgtcagggccaggtatcacatgccacagatggcatataaaatggcttctaataccgattcctgcaaagaggctgtcttcccacacatatattatcctttgtacggtcacgaagctccggcaccggatttggcgccacctcaaagcgataatcctccccgtttttgcggatataatcctcaataaatgtatggctcattacatttcttaccgggtcattgaccagacgctgatatctgataaatgtttcaggagcattggttcttacatccacatacctttcacgacatgctgtgtcgtttaccgtactgccaagcacacacctgacatactcaatattgctctccagcacaagaggagccgggaactcagcgtcagggatgacctcctgccaatcctttttctcgtactgtcttagcagctcaagtgcaatatgcagatgcttaagctcctgttcaaacataaactgccatatgccacgtattcttgtatctgtctcagtttcataacagctccaatacagccagcactcgacatactgatgcacaaggagattttcaaggcggctcatgcatggcttcaacaggctgccatactgtgtgacatgctgttcctcgaccattccgatttcctgatatagcctgcgtcccatctcatcaggccaaagtgccgctgtgttcatatagtagttcatagtctgctgttctgctgctgtgattacgtttgcagccagcacatccattgtcacagggcatttatccgtcatcggatatcgtattgaatcatatggatgcctgtgatgtgaaatagtcggtctgcccggtgtgatctccgtatagcctccgacaagcttctctgcatgctcacctgtggtaaaatcaagataatctgcatagcggtacaaatgatcaaagtcctcgagcaaggcaaaatcgagcgcagacttaatatttttgtcatttactcgttttgcaagatgcgcagtcagatcaaccgcaagctgctcgtagcctatggtgtgctccaatgccgactcatctgccggctttaaatgtgtgagtattttctgctgctgttgctcacttttcctgatgtatgcaagctttcgtctaagctcatcatcacctacgcttcttgaaaactgatgtgaaaaccacacgttttcaaattctgtaccattcatcaatatgattctcgtccttgtatacggatttacctcatttttgttatatggttttacccagaatttctcccagtcaacaaataaatcgccggttctctccggcctcattttaaatggattcataatacaaacatacctccttcatgctattgtatgcacgaaggaggtatgctgtgcgaatgaatcacattctaataatttgtcaaatatatatgtgtatttagagttttccgaatcagcctcataagagcctttcctgctctattgttttatccgattcaagaattgcttcttttaattctgcaagcaatcctgcgtcctttttttgcagtttttccctagttgaagccttaagtggtattccagcgtctttttttaatgcttcctcaaaatccgctacccccattctataaggcattagtttttcaaaaattctatccttaataaacaagaatatgcttatccctccaaaatccatatctccccaatggaggaactcacattccttagatacaataaggcttaatttctttagaaaatacacttccttaggagtaaaataaccatgacaaaaaatatacaaggtattctcatcatattgcatactttcatagttagccttattttctatggtcataattcttttgcatcctgcaagcgaaaccggacttgcatgctcaagtgtctgcgtattaataatggttccataaatctgctttgacgtatcaataacacatgtatcatcaattctatatgacaatggtcccttccattccattgtctgtgcatatgacataatgccatgcatcttcaaaatttcaagccccgacttctttttatcctctttggcatcatcttcctctccctctgtatcataatcctccatatccttctcataatatggagaatatttagtcagaattgataccatcttttgtcgatagcatttttcaaatttctttgaatcattaaaaacctttgcactaaaaacacgctcccacacaggctcctttattcttgttatagaattgatacacttaaaacgcatatcctcatcagcctctgtgacactctttccggcttccagacgccccaaaatatcatcataatatctgcatatccaatcgcagtcaccaacctctgatttccactgctttacagactctatcaatcttaactgttttgcccttgaatcctcaacaccctcaagccgacacagctccggtatgctactgacatcacaatcaatttttttaatatcgctgttgacctgaatccaattaattcttatcttcccatcgtggcctgcttgtgtattattctctatgaaccttgcctgatcgattagtttccggcgtccaccaacaaattccatcatttctgttattttgttcaaatgtttttctccggttagttttcctgaccggtatccttcggtgtctgtttttttaataatatagcctgcaagcgtgtgcttaattggagtttttcccatagcataatacccctgtaaaacaattaatacgtcctatcacttttcctcaaacagctcaatttcctcgccaagtggtcccttgcagaatgctatgcgcgccggaaataccggtgttgatgcaatttctatattcttcggctcgataaatacctcgtatcctgctgcttttacagcctctacacacgcatccacatcatctgttgcgaatgcgaaatgacgaatcacaccttttcccggtgcatcatctccatcgttaaaaatctcaacaattccgtttccggtatcaagcatgattcctgcctgccattcccttgcgaccgggattcccagaatgtttttgtagaaatctattgtcttttcatattcctctgtgctgctgcacttcattgatacgtgatgtataccttttattaagctcattgtttttctccctttatcaattatttggagctgttttgtgatttatagtgatttcagctactttttcccgctatttttccggcttttgggctgaattttaggagctgttttggagatttctgcggtttcagctacttttctcgctatttttccggcttttgggctgaattttaggagctgttttggagatttctgcagtttcagctacttttctcgcaatttttccggcctttgggctgaattttggatgctgttttaaaagttttaggaattacagctccccagtgcctgcctactatgctatcaacctatggctattgtacattatgtcaatttagtcctacttagtaaaatgatgtgagagtcaaaaggtatccaattcaggatcccttaaatcatattatatctataaaattttctattgtccatatatacagacgattatgattgcggccacgcagctatgaaggcactgaacaattacgaaatttatttgcaaattcgtacgcttcattatactatatactcatagtatcagaaaataagtacaatctacaggaggattatcatgataataaaaaacggcattgtagcagaccctgcatcaggtctctacgaacagatggatatacttgtaaaagatggaaaaatagtaaaaatagcacctgacatctcatgtgcgtcagatgctgctgcaactgaaaaagaagaaataatagatgcatccggaatgattgtcggacctggacttatcgacacacatgtgcatttccgtgatccgggcttcacatacaaggaggatatccacaccggttccctggctgccgcaaagggtggcttcacaactgttgtatgcatggcaaacacaaagcctacagtggacaatgtggatactctaaaggacaacctcacacgtggaaagcaggaaaaaatccgtatgtatcaggccgctgcaatatcgcactccctcaaaggacaggatgaggttgacatggcagctttaaaggaagccggagcatgtggctttaccgatgacggcatcccgcttacaaatgctgctttcagctacagagccatgcaaaatgctgcaaagctggatatgccgataagtctccatgaggaggaccctgcatttatcaaaaacaacggcatcaaccatggaaaaatatctgacgctctcggtatctacggctcaccatccatcgctgaggaagcccttgtcgcaagagactgtctgcttgcgctgcgcagtggtgctgatgttgtaatacagcacatcagctccggtgtatctgttgatatagtccgcacctacaaaaagcttggtgcaaggctgcatgccgaggccactcctcatcacttcacgctgactgaggatgctgtcttagagcacggcacccttgccaagatgaatccgcctctgcgcactgaagcagaccgtcaaaagattatagagggacttatcgatggcacaatagaccttatcgcaacagatcatgcgcctcacagcgccgaggaaaaatcaaagcctgtaaccgaagcaccaagcggtatcatcggtcttgagacatctcttgctcttggtatcacaagccttgtcaaaccgggccatctgagcatgcttgagcttttggaaaagatgactatcaatcctgccaggctgtaccacatgccttacggtactatctcagagggtgctgctgcagattttgtcatctttgatcctgacgaaaaatgggtaccatgcgaatatgcatcaaagtcatcaaacacaccttttaccggcatggaactgaccggtaaggttaagtacaccgtatgcggtggaaatgtgatttattcggataaataaattgtgtatgcactattaaaaaagcagattgtgaactcatatgtccacaatctgcttttttctacttttccaccagctccaggcagtctccatagtgcctctgcagtgactttaagtccataatcatcacataaaatactctaccattgtgcactgaatccactatcctgtcatgatcgagcactgaaatatatgtgccgtctgcttttttcatatgaaagaaaatataatcatttgagtgtcctccgttaatctgcgaccatatgcttttttgacagctttcctgttcatccggacgtatcagattacagaagctcttacctgtatatgcaagcagctcgtccatatttttacagcctgtaagcctaagcagctcattgtttgcaagcaggatctcatcattttctttatctgccctgtaaacaatgaacgctcccggcatattgtcaataatatccttcacggcaaatccaagcttcgcacggctctttatacgctccccctcacggtatgccatgcagccgttcttcccacgcattttcacctcataaagtgccatatccgcacaccgcatgagctgtgaacggtcatcagccaaaacaggatactccgcaaagcccagtgaaatggtaaatgtatgttcttcacctttacaataaaatttcctggtttctcctgtaaacttcttaagaaaaggcttaacctcctctaccgtgcaatccggcataaaaatgctaaactcatcgcctccgtttctgcctagtataacatcctttgaaaaatattgcttcatgctctctgcaagcttctgcagtgcaccatcacctgccgcatgtccatacacatcgttgaccagcttgaaatcgtcaatatcaagcattgccacaacacaatgcttttgcggattctgtctcatatattgctcaacctgctcatcaaagccgtgcctgttgtagataccggtcagtgcatcagtcacagcaagtctcttgaaattcttcctgttctcattgattgaaatcaacgctgctgtaagccctgccaaaagcaggacaataactccacctccgatgaacagatatagcagatatctgttattgtaaaacccactcttgggtaaaatctcaagcctccacttgtctccatacacgttaaagtcatatatcaccggatcgttcaactcttcctttgaaccgtaaacccactcatacgtatcatcccacggcgaagcaaacttctgcagactgtacttatatccaaaactggaaagagcctctacagattcagaaaaaatttccggaactttcagtataacaattgtgaagccccaaaagctcttctgaccattttcattctccaaataaaccggattgcgcactgctataccatatccgccctgcttcagctccaatggtccctgcataattacagtgtcattatccctcgcatagcgcgaaatctctcccctgtcactatcatttatcagatcaatcttactggattcattactctcctccggatatatttcagtcacaactccattcggtgctatctgtatactctgaatcgaatcgtccatcatatttgctgcaatatcataaaacctatttatatttccatcaccacttatgacaacctgctttaagctatcggtaactcctattccctccataagctcgccatatatacgctccgtatatgtcatcgcattgagctttgcatttgtcctgttctgctgttcctgactcttgccgactacatatatagcgccgattaacgcacacatgcccaatataaataccactgccggaataatgaatctcttttttagctttttcatttgtatcactttctaaaatcaatgtctatctgttctatatgattttaatattatagctttacgataagaaaatgtctataaatttacttagttcatatcaatatttttcagttgctcacccgctcgaggaggcaaatactttctacatgcgtcgtatgagaaaactgatcaaatgcctgccacttcatgagttcatacttctcttcacagagtatcttcaaatcccttgccaatgttgccgaatcgcagctcacatatacaatcctctccggtgacatcgcaagcattgtgtccaggcacttctcatcacagccctttcttggcgggtcaacgactatcacatccgggcgaagcatatctgtatgtccggtggatgctgtatcatcagtgatattctcttttttctttgcattctcataaaactgtggcagcacatcctcagcctttcctacgaaaaactgtgcatttgtgatgccattgagcttcgcattgtttttggcatcctcgattgcctgaggcactatttccactccgtacacctgctttgccttctgtgacaaaaagagcgatatggtaccgataccacagtagagatcccagacattttcatttcctgtgagccctgcaaatgcaagtgccgtgctgtaaagcttttctgtctgcttcgggtttacctgatagaacgactgtggcgaaatctgatatgtgatgcctgtcccctgtggtgtgaaatcagggtaagaaagcagatggatggtgtcctcaatatatggtctgccccatatgcagactgtctttttgccgaggatgacatttgtgttttccttgttgatattgtaagaaatcgaagtcattccatcgatttttgagagtctttcgcacagtatatctgctgcattcccggctcggcgttttgcttcaagactgtccccatttatcacaagacacaccataatctgctttgatgtaaatccatatctgataagcacatggcgcacgagccctttgtgtgtgttctcgtcatacggcgtgatgccacactcattcatccattcctttatgatatccagtatctctttgttttgcggcaccccaagcctgcagtcctcgaccgggatgatattgtggcttcgcgatgcataaaagcctgtcactatattgccatccctgtcatatcccaccggaaactgtgccttgttgcggtagcggtatggattgtctgcgccaacaggcggctgcattttactgtccagctctgcctcggaaaatccacctatacgcatgagattgttgcgcaccttattatttttaaattcaagctgcttttcataggagagcgcctgtatctggcagccgccacacctcttgtgcaactcacattgcggctcaacgcgaaaagtggaaggggtcttaatctcttccactcttgcgtagccatagtttttctttaattttgttgcgtgggctgttatgacgtcaccaatcagtgcatcctttacgaaaaaggtcatgccatcataatgtccgataccctcgccatctgttcccatatctgttatttcaagttcaaatatgtcattttttttcatgcttttctcttctttattttatatatataattactctttataatgtttgtatccggtgcaagctttcacaccaaaaatcacaccatagctatatttaatattgtccgctttttacacacttgttctgcggaaatttgtctccataaatctgttgtacccctgccactttgtatcgttttcaggcacatttacaagcagctccctgaaggtctccatcttggcatctatgttgtctgcaaagctaagtgcaagtgcctcgacaagtgccggctttttcggagagccaaactcaagctcgccgtggtgggcaagtatacagtgcttcagctcgtttgcgagtactaccgggaagccgtcgatgctcttaatcgcatcgcctacccactctgcaccaatcatgatatgtccgaggagctgaccagcgtctgtatagtcattctccgggaaagtagaaagctcctttaattttccgatatcatggaaaatggctgccgtaagaagcaggtcacggtttaaaaccggatacatttttgcaaaataatcacagttcttcgtcacaccgagtgtatgctccaaaagacctcctacaaagccgtgatgcacgctctttgcggctgaatggaacttgaaacggcgctcaaactccttattgtcaaaaaagctatgtaagagctgtgacaggtactgattctttacagagccgataaagcccatgagttccttatacatgacctcgacatccttatcgctgaccggcagataatccgcagggtcatattctccctcgtttacctttctcgcacgctttatggaacactgcaaattgccctgaaagcttgtgatatcaccggttatggctatgtaatccattgcatcaaattcctcaatgcctactgagccaacatcccatatcttggcatccagcgtgcctgtcttatcctgcaggataacattgtcataaggctttccgcttttggtcatggctgtctgcttgctcttgcataaaaaaatctcattgattctctctccctcgcggagagttgaaatatacttcatatatcctcctaatttcggctaattcatcactccgattttcacctgacaggtaatctccgtgtagccgttgcttccttttctctttactttcagattgcaggtatcctcaggcttttgcttcataagctgtgtgttgtacgcagacacattcgacacctctgtattatttaccgcaactatcacatctccgctttgaagccctgagacaaatgccggtgaatccatggtaacctgctttatataaacaccctttgggatgttatatctgtttgctattttttctgtaactgtagtacaggtgatgcctatgtacggcacatctgcgccgctctcgagcttttcaatggcaggtgacaagtcgcttatgctgacagccgtgagcgtattgttttcctccgccggattgaaatcctgcagcgaaagccctatgacctgaccatctgtattaatcagtataccgctctgcaacttgttgcttgcgatatctgtggtgagcaccgagtaattgttgtcctgcgccgacagctcgttggttgttgacgttacaagacctgtgagaatggcatagtttgcctcaagtgcaatgacagatgctcctcttgaaacaatatttgaattaccaagctccgcaaccgctatagcccttattgtggcgtcgtccagaagcgacttatccacggaaatgattgctatacctgtattgctgtcatacttgaccagcgcagcatcagccatcatgtcgtttacaaaggttacactaagcttatccgccttatccactacatttttctctgtcagaatgattagctgctttccattgtccctcagtatcactcccactccctgaccctcggtctcataggaattgttgaaaatatcagtggcatctgtcacacccgtgactcctactacaaatttcgtggccgaagtgcccactctgtagagctggttctgcactgcctgataatctgcgagtgtaggctgataggtctgcgaagacggctccgaagaagtgccggtctctgtgctttgtgtaccattttcactatatgcatcactgctgtcatctatgcctgactgctgtgtggctgtctgcacatcattattattttttccatctgaagctttttttgattgtctgttgataaccggcagaaatatagcaaaaacaatgcttgcagccactgcaaatgccactccgcagagtgctgctgtgcctgctttttttgcaagtcttttcttattcagcggtttatcctttatcttttctctgataaattgctccatattgtcaccctgattagatgtctttagttactatcttacattatattctgaattatattgcgttgcaaccatattttttctttgagtatgggctttaagtacgggcttgctgcatgtacccgccggacggctgcactgctcccaacggtgcgaatagcgcagtggcttagatactgtaggattatgctcataacacagaaatgccacggcatggatgccggggcaaggagctatcgagccatggaaggcgagtagcgacggtttcgtcatgtatagaaaaagtaaatgcataatccatacagaatcttagtcacgcagcgtagcaccgttgggagcagtgcagcagtccggcgggtacatgtcgcaagcccttactttttggctcgtttaacaaactggtttgttatgtattaaactttatgttatcatcttgtaattatcatttaatacatatttattatggtttttttgaagattttcagctataatatgataagctatacagtaaatatgaatttaatattcaactaccgaaatataaggatatagaaatgaataaaaaagtttacaaaacattggaatataacaaaatcctcaccatgctaagcagctacgcagcatgtgatgagacaaagaaaaggtgtctttcgcttgagcctatcaccgatttatacgaaatcagacatctgcagaccaccactgccgatgcactaagccgcctgtataaggacagcggagtgtccttcgttggcatacacaatgtacatgcttctctaaagaggcttgatatcggtggtgcactgaatacgaccgagcttcttcgcatctgcagtcttttggaggttgcaaagcgcgtgaaggcctatggcagaagcgccatggataatgagaagcaggattcactctccggtctgtttgcagggattgaaccggtttctgcgctctgcgatgagattaagaggtgcattttatctgaggaagagattgccgatgatgcaagtcctgagctttttaagataagaaagagcatacgcggcatgaacgacagaatccatgcgcagctcaccaagctcatgaacaacagcacaacaaggacatatctgcaggatgcggttgtgaccatgcgcgacggcagatattgtctgcctgtaaaggctgaggctaagggcaatgtacccggcatgatgcacgaccagtcatctaccggctctaccctttttatcgagccgatggctgtcgtcaatttgaataatgagctcaaggagcttttcataaaggagcaggaggagattgaaaaaatccttgcagcgctcagcgacaaggttgccatgaatgcggctgccttggagcaggactatgagattctttcagagcttgacttcatttttgcaaaggcaaatctggctaaatcatataacggtgtggcaccggatttcaacaccgatgggcatatcaatatcagaaagggccgtcatccgcttttggatgctaaaaaggtggtccctatagatgtacggctcggcgaggactataagcagctcatcatcaccggaccaaataccggtggtaagacggtttcactaaagactgtcggacttttgactctcatgggtcaggcaggtcttcacattcctgcggctgacaggtcaaagctcgccatctttgaggatgtatttgcggatataggcgatgagcagagtattgagcaaagtctcagtaccttctcgtctcacatgaccaatatcgtaaaaatccttgaaaaagctgacgacagaagcctttgcctgtttgatgagctctgctcgggaaccgacccgacagagggtgcggcgcttgccatctcaattttaaacaggctgcaccagtatggtgccatcaccatggccaccacacactacagtgagctgaaggtatatgcgctttccacagacggtgtggaaaatgcctgctgtgagttcaatgtggagactttaagtcctacctaccgcctgttaatcggtattcctggaaagagtaacgcatttgcaatctcatcaaagcttggtctggacgaaaacatcatcgaggatgcaaaaagcagaattaatgataacgaccttgattttgaagatctgattgcaagcctcgagtcacagcgacaaaccatcgaaaaggaacagcttgaaatcaacagctacaaggccgagattgaaaagctcaagaaacagctcgaagagaaaaacgagcgaatagacaagagcaaagacaagattttacgcgaggcaaatgaggaagcctacaagatactgcaggatgcaaaggaacttgccgacaaaaccatccgcaatttcaacaaatacggacaggggcaggctcctatgagccagatggaaaaggagcgctctgcccttcgtgacaagatgaatgacaaggaaaagaagctgtcagacatcaagaaaaacactgccaaggcaaatcacaaggcgcctaagaagctgcgcatcggtgattctgtgcttgtgctctccctcaatctgaagggaaccgtccacactctgccaaatgccaagggcgatttgtatgtgcagatgggtatactgcgctcgctggttaatattaatgacctcgtgctcttaaacgacgatgtatctcctgccaagaagtacggcggcagcggaagcaagataaagatgagcaaatcgctgtcagtttcatcagaaatcaacctgattggaaagactacggatgaggcacttgctctcttagataaatacttggacgacgcatatatcgctcatctttcatctgtgcgcattgtccacggaaaaggcaccggtgcactgcgaaaggctgtgcatggactccttaagaggacaaaaactattgcggaataccatctcggtgagtttggtgagggcgatgccggagtaaccatcgcaacctttaaataacgacaatgtacttttacggaatataaataatttttaagaaggagattagaaatggctgttaaacagaaaatactgatagtagacgacgacaacaatatagcagagcttatatctctatatctgaccaaggaatgctatgacaccaaaatcgtaaatgatggtgagcaggctcttatcgcgttcgagcactacaagccaaacatgcttcttttggacctcatgcttccgggcatagacggctatcaggtatgccgtgagatacgtgcaaagtccgatgtgccgattatcatgctctccgcaaagggcgaggtatttgacaaggttttaggcctggagcttggcgccgacgactatatactcaagccctttgactcaaaggagcttgtggcaagagtcaaggccgtgctcagacgcttccagcctgcaaagccggaggcctatgcttccgtagatatcaagtgtgtggagtacccggggcttattgtaaatctgtccaactactctgtcacttatgacggacagcagattgatatgccgccaaaggagcttgagcttttatattttcttgcctcatctccaaatcaggtgtttacgagggagcagcttctggacaacatatggggctatgaatatgtcggcgacacccgcactgtcgatgtgcatgtaaagcgtctccgcgagaaaatcaaggacaagccaacctggcgtatcgcaactgtctggggcatcggatacaagtttgaggtaaaataaataatgaagcataccatctacactaaaatgttaatcagctatctgatttacggtgtcatcgcttttttcattatatgcacatttacacagcatctcaccacagactatattgaaaagcaggaggcatccaatctctacagggaagcctccatcattgcaggtgattacgccgccgaatactttgactcatccatgtcgcttagcgatttccagaatcacatgaaaatcgtagccgactatatggatgccaaggtatgggtggtcagccctgacggtgagctgctcatggactcagatgatccgtcaataggcattgatatccaaaatgacagttctaagcctgtagtgataaatggctttgatgtcaccgattttggcagcaacaactatatgattggagatttttatggctccttcaagcataagatgctgtccgtattttccccggtaaatgtctcgtaccagaatatcggctacatagtcattcacaagacaatgagccatatcacggcaggtgtaaatggttttatgaacatctccttttacactgtagcgctcatttttgcctttgcatttgttctgcttttcatgatgagccgctccatttaccgtcctatctccaaaatcacaaagaccgcaaagaagtatgcaaagggcgatttcactgcccagattgatgtacattccaatgacgaaatcggctatctggcaaacacactaaactacatggcaactgagcttgatacgcttgaggaggatcagcgcaagtttgtttccaacgtgtcacacgacttccgctcccctcttacctcgataaagggctacgtggaggccatgctggacggaaccatccctgttgagatgcaggataagtatttaaatatcatactttttgaaaccgagaggcttaataagctcaccaagagtcttattgatctgaaccagttcggtcatcacggcatacacctggatattgctgattttgacatcaatacaatgatccgcacgacaatcctcaccttcgagggtaaatgcagtgaaaagggcttaagctttgacctgctgctcaccggaaaagagcttttcgtgcgcggtgatatggtcaaaatccagcagattctttacaacctgatagacaacgctgtgaagttttcaaataatgattcgagtatcaagattgagacgagtatcagaaatgaaaaggtgtttatatcagtaaaggatcacggtatcggtataccaaaggacagcctttcaaagatctgggagcgcttctacaagagtgatttatcccgcggaaaggataagcgcggtacgggacttggcctgtctatagttaaagaaattgtacaggcgcatggtgagaatataaatgtgataagcactgagggtgtgggaactgagtttatatttacgctgccgctcagcaaaaaagaagggtgaggcgcagctcatcatatgataggtgtggtgggcgcctcgctttttaggttgtgaggctgccggcatagcacacagtatattcctcagaaaaatgtgaagtcagccgcggttatttgtccgggcagattatggttttatttacattttctttcttttttactttatggaactccgcggcagttcacatttttcttcggaacacaccgtgtactctccggctaattcaggtttacgagcgaggtgctttgctaccttgcattctggcagtgccggacttatttcactggcgtgaaattttgtccggcacttttttcttcttaaaatttaaagctcatttcacttatgcgaaatgagcttatttaatagttatatattgtttataaatattctgagccgccttgaaaacacaagaaaaactgattttaaataattacgcttatatcatatttacggttcatatttgctgccggccgggtcggttactgtgtagtcgccgccggatatgtcggctgtagtttcaaagtctgtgatgtcctgatttacgataccatcgaacaggtcatatgtgaaggtgtagccctgtgccgatactgctttgacatatattttgatattgcttgcggctgtgacagggattaagtcttcgattttgactgtgccttcgaggctatggagcttaccgtcgtcctcttttgaggcattagaggtatcattttccgtgtcattctttgagccatcttttttggcatcatccttccgacttaaggcggatgtgatggagtctgtgtctgcagagtctgcactgtctgtgccgttttctgccaacagctgtcggatatcgtatgtctttagctctgtatctgagcttgcaactacgagctgcacactgttaaagtcaaagtaatcatttcccatgaccgctacatctacatctgtgccaagctttatgctgccattgtcaaaggttggtttattggcaagtatgccggatgctacatttttgaacactgatgtcacaccttcaaactcatcgagcacctctgtgcttctcttatttccgtcaacaaacagaaatgtcacattgcctgcatagtcctcagacagtggaagggtggcctcacccgtatacttgatgccgtttagctcgagcggtatctcgtttgtaccgaaaaatacactggtttttgtatcctctgtgtactcctttggcaccaccgagacagagactgtgtatgtcatatcggtaaaatctgcactttttaaggaaatatcccagtctgttatgaggctggcctcctcctcaagagtggacttgatatcatcctgcatggtctgcacatcagaaagtatcaccgatgtgttgtctgaggtgtatgacatctgtgtctcgagcttttttatcctgttattaagcaatactgcccccgcaataagtgcggcaagcagtattatggtaatcgcattgaaaatattttttttcaaattcatattatagtgttattcctcatcttcctctgcagctacagctattccaagctcatcaagctgctttggatctacagttccgggtgcctctgacatgaggtccgaagcgtcctttaccttagggaatgcaataacctccttgatattgtctgtatgcagcatatgcatgcagatacggtcaacaccgaaggcaagtcctgcgtgtggcggtacaccatatgagaatgcatcaagcaggaatccaaactgctcatgtgcacgctcctttgtgaagccaagcacctcaaacatcttctcctgaatgtcatcctgatggatacgcactgagcctccaccgagttctgtaccattgagtacgatatcatatgcctttgcacgaactgcgcccggatctgagtctatcttgtcccaatcctcctccataggcatagtgaatggatgatgcattgccataaatctgttttcctcatcagaccactcaaggagtgggaactctgttacccagaggaaattgtacttgttctcatcaatcaggccaagctcagctccgagcatgagacgaagcgctccaagtacattccatacgattttattcttgtctgctgcgaaaaggagtaaatctcccggctttccgttcatctttgcaacaagtgcatcaagctcagcttctgtcataaacttggcaaatgatgacttgtatgtgccatcctcattgatgcacagataagcaagtccctttgctccacagccctttgcgtgctctacaagcttgtcaatcttcttacgaggcatctttgcctgtccctctacattgataccgcggacagagccaccgttttcaagagctcctgtgaatactccaaagccacagtcctttaccacttccgaaacatcgcaaagctccataccaaagcgtgtatcaggcttgtcagaaccaaatctgtccatagcctcctgccaaggcatacgcttaaacggaatctcaacatccacatttatgacctctttaaaaaggtgctttaacagtctctcatttacctcgattacatcatcgatatctacaaatgaaagctccatatcggcctgtgtaaactcaggctgtctgtctgcacgcaaatcctcatcacggaagcatcgtgcaatctggaaatatctgtcatagcctgaagccatcagaagctgcttaaagagctgtggtgactgtggaagcgcataaaaatgtccgtggtgtatacggcttggcacgagataatctcttgctccctctggtgtagacttgcaaaggattggtgtctctatctccaaaaagccctcgtttgccataaagtcacgcatcacacgaagcacattgcttctgagcatgagatttctctggatatcagggcggcgaagatcaagataacggtatttaagtctgatgtcctcgctggtctttgaattctcctcaatctggaatggaggtgtctgtgcctctgaaagcactctgattgatgtagcgataacctcgatatcacctgtctttaagttctcattgacagcagctgttctcttctggacagttccctcaactgcaatgacgaactcacttcttaaggtgcctgccttttcaaagccctctgcacctacattttcctcgccgaatactatctgaagtattccgcttctgtctcttaaatctacgaaaatgagacttcctaaatttcttctcttctgtacccagcccatcacggtgaccttctcaccgatattggcatttgatacctctgtacatctatggcttctatgtaagccctgcattgattctgccattttatactccttatatttctactatatatttattctaataactgtttggtaccgctgctacacagctaatctgctgcttatcagattcctatctgttaaagaactcaacaaactcctcgtagccctctttcataagctgctccttctggaatttcttgttcttgttcatgcgcacaacaagcacctgctgtccgtttgctcttgcgtcttttgcctggttcatgacatcaacaagcttgtctgccggatatttcttctcaaccagataagccaccttctttggactctcaggaatcttgaagccactctccatgagaagcaggataattctctcaaaaccgattgaaaaaccacaggccggtacatcatttccggtgaactttccaatcatcttgtcatatcgtccgccaccgccacaggctgcgccaagctcaggcattgatatctcaaaaatagttcctgtgtagtagctcattccacgaacaagtgtagggtcaaatacgagctcaaactttgctccctttgtggcattaacagccgtagctatctctgtcatatttgtaaccacttcttcgtctaaatattcaccgagcttttctgaaagtatttttacaccctcagtgacatcccttgtctgctccaaaagcttgaacaaatcaagatatttgtcaatattttcctgtgggtagccatcctgtgcaagctcacttgcaacgccttccactcctatcttgtccatcttatcgagtgtgataaatacgctgtcgtagtcctcatcagcgaaaccactgtaagcagccattgcctttaggattcttctctcgttgattcttatctcaaagttctcgaagccgagtcttccgattgtggtagtggttgctgtaatcagctctatctctgccagattgcttggctctccgagtatatctatatcacactgtgtaaactgtctgtagcggcctctctgaggtctgtctgctctccacacactgcccatctgaagtgccttaaacggcgatggcaggttgttggcattgtttgaataatatcttgaaagtggcactgtaaggtcgtagcgcattccaaagtctactacatccgattcttcctttgctgtctccagattcagcttctcgcctctcttcattaccttgaagatcagcttctcattttctccgccctgcttgcttgtgagatttgctatattctccatgcatggtgtctctatcggtgtaaatccgaagcttctgtatgtatccttgatcacacttgtcacataatcacggatttccatctctgcaggtagtatatccttcatgccgttgaccggctttttgctcagtgccatttggtttcctccatctatattaaaatattgaattcattagctattctattatacttttcggttttgcaatcgtcaagggtttatggcaattatacgggctgcaagccacggcaccgttagggcacacgcatatgctttgctttcgctacgctttgccgctaagatactgtacggattatgctttttgcgcttctatgcttgacgaaaccgtcgaaacgcgccttccgtggcgcggttctccttgacttgccctccatggcaagtcatttctgtgcttcatatgcataatcctacagtatctaagcggcttcgctattcgctcaatcaaatgcatatgcgtgcgccctggcggtgccatggcttgcagcccttactctgtgacagtattttcatttgcacggtttcttcctagtttcttcaataaacttggttgtactgcaaagataacgagcatctgtggtgaaaggttacaaatgcaaatgttcatctactgtggtggatttcagatgctaatgcacatctactgcgttgaattgcagatgctaatgcacatctactgcggtgaattacaaatgctaatgcacatctactgtggcggattgcaaatgctaatgcacatctactgtggtggattgcaaattccgcacggagacaagcccatggattttgcttcatcaagcgttacctctgtgtcactctttttcaaggtccgacaacccgcacggtgatatttcttgcctgttgcagtgatatgaaccatcgtctcgctgtttgaagaatctgcagcgctattttctgctgctgagctgtctgagcctgatgatgcacttcctgttgtactgcctgaagagccggattctcctgccccgcttccagcgctgctctgcgagtcttcattctgcggtgtatccctctgagctctctgctgcggagtggtgccatccagccagctgtcaccattctcatagtttattccgactccgggctgcacattatagcaatagacattaaaaagtatgccgccaccgttatcctcaaccgactttgcctctatgagaacgccgtttgcaactagattgctgcccgagaacatcggagtcactctgtaaagcacatgatttcctgtattgtttacataatccgctaccagattttcaaacggaagcatcccctccacattcaggtatctcgtgccggtaataaggttcttcggattggcattctccccggcaagctgatagccaataagatgacatcgattatataaatacctgtcctttatcacatcatacttcaccgtatgccagcctgatggctttatcatgcctatcttgccacgctcctcagtcggcatgatatccttacagatattggcataagccacaccgcatctgccaagtgaatccaaatcactgtaattttcaaaagcagtggtagtcatatcgctgtccgtaaaaaaaggctcattattgttgacagccacgtatgccttgccatcatatgcaggaatcgcatcaagtgaaacataggaattgttgtttacaagatcctcctgtggcccatccgcgttatccttgctgcctaaagcaccggaagaatcctcacctgccactacagctcctgcggcatgcccggcaccttcagtgccggataaatcagcggaggcacagcctgtaaaaattgtagcaattgcaagtaattcacatagtgtaattgcagctgttttccttaactttagccatatgttcatataaaatcactctttctatcaatcgattgatattggattttccctaattacaataaattaaataaatacttaaattactaaacctaatatacttttatttcctcactttatttattatagcaaacatttgtttgtttttcaacccttgctgtaaagctatgcatttcacactattggggtatgttagcgactttccccgatagtacgcgcctatgtcgcgtaaactaaaaaaaggtttcgagcaaatactcgaatccttataaataccagcttattaaactatcatttaagattgctcgatgatactaacaactcttgaacttcttttttagtaaatatacacacaatcaaaacctatatgtatattttctataaaataaaaaggaagccggacgcatccaactcccttaggcatagtccgcagacgtccgccgcaattctgtaatatattatgccataatgaaaacttttatgcaatagcacttttgaattttccacaaatatttttgaattctctacaaatactttttcaataaattcaacttcgttctggtatctgtatacacaactgtgttgaaaatggacgtagaaacttttcccctaagttcttcacagtccttttcaaacaaacgaataaatgccataattttcttcttttgacactctaatagtttcatcataaagcttataagaatcacataatcaacaatagactcaaatgtaatattattaattcctgtctctgcacttatacacttagcaattctcaagcttaccttacccgttttaaatctagcatcaaaaatcgtattattgtgtgctacagcatttcttaaatcctttaaggcatatacgatcaatggtaacaatttaccatctcggtcataagcaacctttatgcctacgctcttagaaatttttttcctggtattttggtcaagacaacctacaaatgtaccaaattcaccaagactaattaattcaaaaattgcccatataggaagcggctgatccttgtcataataatgattcactataaacctcttaccataatctcgggaaataagactatatactttatttctaagattcattcttttattgattgcttttttataatcattactacctatcggataggctttgtaatccgttaacaatttcgcatatatattcgcaaatcttttactttcagcatcttccaaaataacttccaaaacatagtttttaaatgcagtttccaaaaacattatctccggataaaacattgtcttaatcgccatatcaaagtcatagattgcctgcacctcatcaaaggaattgaatgcatatgtattcgctggattattatgaaaacgatatcctttatatccatggaaataacccatatatctaagttttttcttatcactacttccagaaatactcaatcctttttcatctcgcatatatgccatcagcgcattaatacttttaggtttctttttcattgacaccatactccttttactgtagccttctcaacaataattttaatggtaatttccatcaaatgtcaacagcaaatactctctttctctccatctatccatctcattgttactgttcccccctaacagtgtgaccagtaactctcttctaggcggattcccaccccgctgggcggatcttacggcccgaactcaaaaaagccaccccaggcataacacccggtgtggcttttaatcatgtattatgaaattatgcgaatcacctaatgtgaatcaacactgctatattgcagaccaaatctactcgcaaagcttagaaaactcatccgcaacaaactgaaccttggttccgataataacctgaacagaattcttgccaggcttcataacgcctgcaacacctgcagatttaatcttcttgtcatcaacctgagtaatatccttaacctcaagtctaagtcttgtgatgcagttgtcaatgcttgcaatattgtctttgccaccgcagccctcaagaatagtctttgctactgctgtgtagtcattgttagaaagcactgccttcttctctgcctcaacatcatcgtcctctctaccaggggtcttaagatcccatttcttgatagcgaaatagaatacaatgtagaatacgataaaagctgcgattccaagaggaatgatgagccatgtctttgctgcagccggaagtgaagatgagaataataaatccatcgcgccggctgagaatgagaagcctgctctaaatccaagagctactgtaatcattgtgaaaataccataaagtaaagcataaatcacatagagaacaggagcaaggaacataaatgcaaactcgaaaggctctgtaacaccacagatgaatgcacagatagctgcagaagcaaggataccgatggcagcctttttcttagcaggctttgcacacttaaccatggcaagtgctgcaccaggaataccaaacatcatacatgggaagaaacctgacatgtacattccgaggctccatgaaacatcctttgatgtctcgccattccagaaatgagagaggtctccaagtccgatagtatcgaaccagaatacgttgtttaatgcgtggtgtaatcctgtagggattaacagacggttcaggaatgcatagatacctgcgccgactacgtcaaaaccaacgattgctttaccgatagctacaagagcaccgaaaagtaatggccatacaaacagtaatactacagatacaaggattgaaacaacacctgcgataattgctacgcaacgcttgccgctgaagaatgacagccagtcaggaagctttgtatccttaaatctgttgtaacacaaagaaccaataacaccggctaagataccgataaatgggtttgcaatcttgtcgaatgcaagtgtctttgtagcgctgtcagcgatagatggcatgatttttgtaacaaagtctgtagacaggagtgttgtcatcatcagccatgaagctaaagctgcaataccgccggtaccgtcgttcttttccgacataccgacaccaacgccgattacaaaaaggatggccatgttgtcaatcaaagcgccccctgctttaactaaaaacagacctattaaattacgtacaccctcgatgtcaccaccctgcatggttgcaggacataaataatatccaatacccatgaggataccacagataggaagtactgctacgggaagcattaaagctttacccagtttttgaagaaatttcataaatttcccctcctttacattatgtatactaaactggagatactccaataaagttcgttattattatataattatattcaaatctacgcgagacttaaaatctcatcaccggcggatacattcccctctttgagtatctttatctcactataatcagcagtgttgccaattaaaaccggagtaatgacattaagatctgctgccttaatctgctccaggtcagcctccatcaaaaggtcacccttcttcacctgatcaccaacggaaatatgtgatttaaaaggagcaccctttagtatcactgtatccagaccaatgtgcaaaagcaactcgactccctgagtggtcgtcatggtaaaagcatgaagcgtatcaaatacagctgtcacctcaccatccgccggagcgtaaaacctgccctcagaaggaatcacggccacgccgtctcccaatatcttctcagaaaaagtaggatccggaacctctgtaataggaaccactctgccgttgcacggagaacagatcacctttccctttgacttattcttaaaaaaacctaacatgatatctcctttccgtcgatatacacactcacaatatccaaatcatcattgagaagcacaaaatctgctctctttcctgcagaaatgctgcctgcttcatcatagatgtcaatctccttagccggattggctgtagcacacataatagcctcctcaagcggaatacctgcctgccttactgtgaaacgcatacaatccatcagattggttgccgagcctgcaattgtcccatcatggagtgtggcaagcgaacctctgaccgtcactgcctgtccaccgagtgtatactcgccatcctcaagccctgtggctctcatgctgtcacttattaaaatcatgcgcttcgaaccaaacatggcaaatgttgccctgataaccgacggatgaatatgcacaccgtcacaaatgagctctgcatgacacttttctgaatctctcacagccccgataactcccggattcctgtgatgaagcggtggcatcgcattatacaaatgtgtggcatggcttgcaccatgctcaatagcctctaccgctgtgtcataatcagccgctgtgtgtgctattgaaaccacaacacttcctcttaccctgtctataaaatcaatcgcgcccggctcctccggagcgatatctacaagctttatcaagccatgggccgcatcctgaagctcacagaaataatcataatcacatcgcatgatattctctgccgcctgtgcgccctttttagaaggactgataaaaggtccctccatattgatacctacaagatgtgcaccaccatgataattataatcaccggcatttttcatgacactcaaaagctcatccttttgaatggtcatagtagccggacacacgctcgtcactccgatagaagcctcgtatgctgtaatcacatcaagtgcctctttggtgccgtcacacatatcagctcccttgcatccatgaaaatgaatatccacaagacccggtatcatgataagacctgatgcatctatactctcctgctgtgtgctgtcagcagccgcatccgtgtcagctgttctctccaaaacactgtcaaaacggccatccttaacgacaacatcaccttgcataaagctgccatcctctgtaaatacccttgcattttttattatcatatacatgtaccttctcaactaaaaaacatctacagtctgctcagtgcagcctcatccgctacaagcgtaacatcattgtgcagctgtaatacagaagccggcacctgtggtgtaatcggtccaaagaaagccttgtgcacaatctctgccttatcctcaccacttgcaataataagaatctttttagcctgcatgatggtcttgatgcccattgtataagcctgcttcggaacatcatcagccgatgcaaagaagcgcttattggcctcaatagtagactctgtcagatccacacagtgtacctgcttgtcaaaagactcgcccggctcattaaaaccgatatgaccattgtgcccgataccaagaagctgtaaatcaacaccgccaagagactgaatcagctcggtatagcgcttgcactccttctgtggatccggctccatgccgtttggcaggtgagtattctcaatcggaatattcacatgatcaaacaaattctgatgcataaaataatagtagctctgatcattctcacggcttaatcccttgtactcatcaaggttcaccgtcataacctctgagaagtccaaatcccccttcttgaaccactcaacgagctgcttatataaaccgacaggtgtagagcctgtagccagtcccaatacacaattaggcttcataatcacctgtgccgatatgatatttgcagcctttctgctcatatctgcataatccttagcattatatattctcatgaaaaatccctccaattcgtaaaatatacccaatactatctgcacaaccttcaaaagtgctgcttgattgcatatatgcattttaccttatataggacattttgtccagtactttttgtcatattttgcatattttataaaaaaaatattaaattttaatgcggtaaagtggtaaaattgcataaaaataatctgctactctaatgccccttttacttttttgtgtgaaatacaacgttcttcccgattggcaagtgccttaactctgccttctaacagaagctctcttcctttttcatttcttgtatatatgcagtcatagtttccgatatacggatgcatgcattttgcaaaacgttctgcatcctctttctttttagaaaaacaatttggaatggcatagaaaccattcagtccttttcgatttttcctttttacaagtatataacgctggttgtctataacatcaaaaaattcattgacacactgtgcaaacaacgctttatccctgccacttccacctgacaaataaataatatggtgatccggtcccagcgattctgctactactttacaatgtgtttcttccagaagccgttgctcctccaatgctttacggattccatttccaaatgcctttaatctttttagtggactgcccagcatgaatattttcggaaaacgcattataattccagtcaatccaacaacaatgaagaagtaacatactccggctaagcttcccgatttggatgctgccgccacaacacctgccccaatcatgccaatcagacacaaaattcctgacagaatcattgtaagaatcgcatcccagaaaacaacactcgtaacaaatttgtcttttacctctgtctcatccacaatatccattttgtcatagattgcaagtgcactattccaacgttcttttaacgcatcacgttgtcctgacattttcaacatttgtctgttaatcctgtcaacattagttttattaaatggagttttaataattgacaaccgttttattccattttcaattgtattttctgagtaatgcagaccaagaaaatgttccatccttcgttcgagcatactgtaatcgtcactaatctgattgtcatctgccttcagcacttcgttccatggtctcagacacactaaatgccagatgttacttgttttttccggctgttctttcatcacacgtatagcgcgtccacgcatctggttgcttaacataaatgaaccgacaaagcttgcaaggattagggaattgatacaaggagaatcccatccttcccctaacaacgattttgtaccgatcaaaacctgcatatagccttttgaaaaaacagcagttaccgcccctgtcagaaaatgtgcatttccaacagctgttactttaagataatctgtttccgaaagattgccgatcctactgaacgtaacttttccacttgttccaatctcctgttccagcgcatcttttgcctccgccggaataatcacaatcgtcccgcaaagtacaccaaaacgaatttgtttgtatttcttttcattttcacgtcggagcatttcaaaaaacgggagcacccctagtgagtttacatcgtattctgtatttccaattgttttttcatattctttccggatataatctgtcaaaaccagcagtcgcagattctgaccggatgtctcgtattcatggaatacaatatcacggatgctgttacattttcccagagaattcgtgagcattttttccactgccgcacttttcgtcatgacaacttttttcttttctatcagaccgttagattttaaatcagcaattaataattcacgatatctcttgtcacacaaatatgaatcctcatcatcatacaaaaatccctgtaacagacgttccatccactgtgcgttcatggatggtaatttttttgcccctaaaagcctttgtaatctggacggaaatgcaatatttttgctctgtaaataaatcaacaatgatgccagatatgccggattatccagtagcaggtcatcagagagctgcccactcagccccttatggcttctcacatatgtaagaaactgtgtatcctgcatgattttttctgtcattgctttactgcgttcttcaaaatgtctgacttcctgctcttcctcttttgttggatagttgaagtaaacataatcctgatgtggacagaggcttccctcttttacgagttccggtatcgtaatttcttcatcaatctctccacacatattcatgtaacgtgtccacatagccggtgtggaatcatacggcggtgttgctgtcagcgctataatcttaaggtaattcaactgttttttgaattcttctaatgctttccaccattcacttcgcaagtggtggcattcatccagacagagcacttcgattcctgcctctttcatcgtctcgaccagatcaaaaccgctgtaatctacttcttctgtctccgtttccgccaggcactcgtctgtgcctgtgccactctcctcacctgcatcttcctgcattccctgaaatcttgtcatggcactgtgcaatgcctgatatgttgccacagtgattgcctttggctgttttaaattctgtgaaagatattcttcccctttgataccctcacataaaaaggcttcctctatccttgcaatccactgctctctaattgtaatagatggtgctaaaatcagtgcttttccgttcagcctgcggatcatttcaattcccagggtcgtttttccggaaccgggtgccgcaacaatatgtatttttccatctgatatgtacctgtcagcatgttccaaaactcttgcctgatactttctccatgttcccttaaattctaaaataccttcataattcataacaatccattctcctctgtttattccactgtttctatgctctgtaattattatatcccactgccaattaccttacaagaaagataaccaaataatatttaacataggttgaccacattggtgcctgaccccaatgtggtctcatgcttttgaacatttaaaccatttttatctaaaatgatctgtaataaaaactgtgaacacgctttatcctcaaagtcttttttaaaagcagtttggtatttaatcgtcagcatcaagatcctccatcaactctgaaacggatgaaaatcccttacttaagccaatcttgtttttagtatctttcatcgcctgaattgtttcagcattaggaacatccattgtaattttaaatgggattccctgctcacgtaccgcctgctttgccgtcatcacaaaaaatgttgacatatccaggcccaagttatccaatagttctcttaattcatccttcaacgtagaatccatacgaaacgtagcacttgtcattgacatattgttcagctccttttcaaatactaacaataacattatattctttcatataattattatactgcgttcactgattaccgtcaatacaacgtaatgctatttgtcaacgtattttaaagacactgtctttccagggtcaatgtattatccttcccccactaggttgaccacattggtgcctgaccccaatgtgtttttcataggtgttgcacaatcatagatagtcttctgtgcgtctcagctgggtatatggcttcttattccgcaaatcggacgattccttcagatccacttctacgtagagaaccccttcttcgtcaccggccttacagattagattcccataagcatcggttaccaaagattcaccggcaaactgcatgtcgtcctctgtgcctaccctattgcacatagcgatggctacagaattctgaaacgcctgtaccctgatctcccactcaaaaatcgtgagtggctctgccttttcgttaacggtcggcacaaggatcaggtcggcccccatcagcgcttctgtcctgatactctccggataatgccgatcaaagcaaaccacgattcctatcctgcctatgtccgtatcgaacacatggaatccgtcatcggatggcgtatagtagtcctgctcgtagaaatgctccgcctgcgcgacatgtaccatcttctggataccaatgatctcgccttcacgcagataaacatttggaactgccatgatatgattttccctgcaggctgcctgaaatgcctgtataatctcgccgtcaagttcacaggcatatcctgaaacgtcctgtccgggatattgcgggaagaactctgtcagttgcacttctggaaaaaggatcaggtccgcaccattttctgctgcctctttgattgctgagatcccggcattcagattttcattcacgcttcctttatttttattttggaataaagcaattcttgccatagtttattatcctgtatatgtatcatcgacgttgttcttaaagttctgctttgccagccactcgcgctcttcatcattctccgtaatatcgatccgttcaatcttgaagatcacaggccgtgtgccagcattttactgccccatccttttctttcgctctgtattggatattggctcttttccttccaacaactctcgcaacgtgattgagtagccttcatccggtaaatctccctctgagagttttcctttttttataccattgtcttttgcaaattgttgaagtttttgatcaaatgcctcaatatctgattttatttcatcataaactttcggtgcagcagatttgataaaatcatcatactcctgatccgacatctttgattcatcgatatttttctctttatacacgatatccataatcaatcggaaaatattttcctgactttttcctaaaactgtccttgtggaaagtcgtttcatacaatacttcatatccatattgtccatattttttcgcatcatacttttctttggtctattcaagtccagtttatatacagaatctacaattctctcgtctaattcagacatcaattgattcatctcgccgtcaaaacttgcccccagaataaataatatttgattgcagactgtctccatttcctcatccgtcagttcttgtccaactggcaaaggtatacgcttcaccataagtggaatcgtattgaaatacccaaaatatatcaacataaatgccaaatgttcacgtaccttggtatccaaccacaatttgtggaacgcatatttatcttccaagccatgaaagaactgatcaaattgtttgcggttctgaaatacccttgcatattggatttgaccatggtaaggatctggcaaaccatatgcttctaacaaatgcaccatccccacatcatatttgctactattttctattgtcatttccatcttgaataattcttgttccaaatagtgtaaaatatcctgttcactatttattcgcttttcaacaataactcctgcgattcttgttcgctcctctttcttcttcaaaaacgtagaagtaaaaaatgctacgatcaacccacaaatcaatgtattaattgttgtaaaaatattattcaccacgttatctggcaatgcacttatccattgcaacattttatctccccctcgtatcaacgtgtttattcaattcttctaccatatatcgttctgtgttacgatccatctcatataaagtatctgaaaacatataaatcaactcctcttgattatttcgatatgcaatcaaatctcgataacatgaaagaactacttatattttggactacgttttcaaaagtgtcaagaaatctgactttcttgattatctgttcttagtaatctcataccctgctgctttcattctttcaacaaacattacctattttcaataagattttgtttcaatgtttctattgttgcctgatttctttttaaaagttctagctgccgatatgcttcatctttctttaatcgctgataatccttgataatataaagcttaaattctggagaaatccatgaagcaaactcaaaagcaatatccgaatgagcataagtgccaccatatcgtcctgattttgatatgataccgattgcgtccgttgcttttatccattgttgcggtgtcagcgtaaacgcattctctcccgactctgctcagtcaacttatgaactacttctgctatctgatcccttgttctggcatctatatattcataatatgctaatattcgcctttttcttctttcattgacctcttgtacttcatcataatattgcatcactttttcctcgttgcctttgattttctttcgatattaccattttctgtttgtcaatgcattatccttactgtactctccccattgatttccatgttcacggtacctgatacttattctactttcgtatcattctcagtaaatcatttaaatccacaagttcaatcatagaattttgatcacctgcaaatttacgtgcctctctagaaaaagaggaagttgaaacaataactgccttattcactctatccgccgttagcgtaccgaatacttctcggacgattttcacaccaacaggtcttctcttatcatactttttacattcgatatacagaacacatggaatacctcccatatcatatgtcgcaattatatccttgccgccatcatgggatctttgagttacctgtacatcaaacccatttttagaaaaaatattagccactacatcctcaaactcatcagacttcatggtatatgccgctcttgaatccataagcatcccttcgataagtccttctatataatcgaccttatctgctattctattctcaacataaaccggcaaatcgaagtcataatactctatttctacagaaggttcccacacgaaatggcacccctgttcctcgtgtgaatgataattatatgcacctactggatattcatagccacttattctataaatcattcgatttctacaatattcacattgacattcaccggaaaacacgtactctatttcttctcccatatttctttcataagagtactaatccatatccaatgaatctttttctatgagttgaacgtgaccacatacctcacattgaacaactaaatcattttccagattcatattttcacttcttcatgcagtctatcaatttccaattactgaaaatatccttacttgcttcatacgatttatcttgtatcgccaaacacaacaatttccttggtctactcattgcaacatataaacattttctgttgtaattagacgagctttgaatatttccgaccccaaagtatgtgaaaatacttttgacatcagagctacggcttctttccgtttccaaaatcaaagtcgcatcatgtgtctcacctttaacaccatgaatagtatcaaactgaattcgccgcccgcacaatggttcaataaatgaattagaatctttgtctattataggagcatccttatcttccaaaaagtacgctggtaatgctacaagaatttcctctatcttcttttcacacaaattctgaagaagatcctgaataagcgaatcaatacttcccctagaaaaatcctctaatgtcgaaagcgttatcaaagcatccctatatacatcaaaatactctttatccaaagtttgttttatactacttacggtaaactctttgcatgtatccttatttttagcgccaatataatggaaaatcttgcataaaagttttctgatattttgttctgcaataaacaatcttccctcacaacaagcttgggctacggcatctatatatgaccaataacgataatcttttttattagaacccctgtcatcaaattctgcccaataatcacttatcttgagtcccttcagttctttgttttttactgccccaatgactttatatattccagccggattatcaagttgattgttatccaacgctgcaataaatttacctacaacctgtcctctagattcatcatcataaacaattagcgtggggtgaaatcctgtattcccagctgctgcataaatgcttttctgacctgaacgcaatgctttcaaaacatctgctatctcctgaccatatctgcaagaaaaagctatagacagatgatcatctgcaggcacccaatcttccagaccatcaatctcggaattgtatattgcctgatccggatcaccaatatgcattacgcaacacttgcttggattaaaaatcttatccaatgcatccctttgattcttattacaatcttggtattcatcaatgaaaacatacgagaaacgcttacaaaacagatcagtatattcagtagttaatgcttcaattgcctcgtgtgtatatgtatatgcatctttataccgaatcatcccctcggtttgcaatagctcatcaatggcctgagtatataattttgcagaatcagatgcttttcctgccattgcccgcctttgttttcctacatacaatgctccactttttaattgaacatccttacagaaatcaaacagattatcgtaatgactattttcatattgtttccggaagaaaaataaaagcttattgtattttctctgctttgcaataatactcaacaagtgctgtgtatagatttcattatcaaccacctgtatcgctgtattcgtaagtttcttcaaatacggggtaacaacaaatctgtcaataaaagactggatagtcccaacatagtttggatatcccatcagtttatccgcgcagtccgaaagcctggtctttatttcatctactgcaacgtttgtatgagatagaacacaaacacctgcattattctctaacggcattctatcatataaaatcttcagttttgcaagaagaatcgttgtttttccgctacctggacatgctgctacatctttcgattcccaacaacgaatcacttcccgtgcatcacttgcaaattgatgattgttcgaaagcaaaagagcctcaatattgttgatttcctgttcgctaacaactattgattccatccgcttcacacctttctatacttctaacccaactgcatatctgattgcttttgccaaatagtttatgtacggatcgttctctatgatctctttcaattttattctttcatcttcaagtattctgtactgatacaaatccaaatcaaacatattttcttcagtaagatcatcagttttttctacatatttccactttaacattgatgccaaacactgagcaacaattgcctttaatccactcttattactctcatcaagcatcaattgaaaaatcttataggctttttcttcattagaaaactgtttccattcactttgctctgtttcaaccattctattttcggactgaatcttatccacagttaatgaatacttgtcactattctttatcttctttgcataatgaatagccttatgaaaatccgaagccaaggcgcttaatgccagacagtattctagtgtccatcttggcgctataaaacctttaatagtatcaacagaataataactttccttatctcctactttagttgtagtctccatgagctttttgtcaaaacttccatcctctttatattccggacgtacatcacagtcagtaataatagctaccggaatactaacactggaatgatcagctcttgtgagaatcctcgagtatcttaaaaaggctgtgctgcccacattcactacggagacaccgtgtttctctaaaggtaatccaataatctctgccaatgtgggaatcaaaatattctcagcatccccttcaaccatgattatacctctagcaaaaaacagatttgccttagaagtatctaaaaatctttgaaggaaaagatagtcacccttttcaaggcctgtttttccataagataaatcatatccaacaccatttttcaacaaaacgatgtttttaagatttatctttgatgccagcattgtgctatgggtagagacaattatctgggcgcctgattcattatattcattttgcaaataactaattaatctcagctgcgcttgcggatgtaaatgtgcttctaattcctctattaacgcaagttttaaacagccattatcgtcatgttttagtaataataattcggctgccataaataacagattcaattcgcccaagccgggatgtgtttctggaacagtcaaagataagctctctaggatggccttcagctgataatctgacgtttcaaatcgtgcatcactcgtattatccgattcattaaatgcatccaaagtgctcttaattgatctcagaattacctttccatcatcttcggaaaaatatttctcgacattctgatttgcatcttttaatatatcaatcagtttatgaccgtcttgttttgagaaaatcggatgacctaataatatttgagaaattcttgagttacgaccagagctcatctcacgttctgcatcacggagaggtttcagatatacagcttttaacaattctcttgctctgccatccataacaactccatctacagcatcgcctatccgcaactctgagaatattctatttttctctttccaagccttgtaatacaaatgcattgaatagataattttatctccaactttacaaaaatccaaatattcaataaaattctttgcttcattgtttgtgaaatcttcaagtaagcattctatcctaaactctgtaactgattgaccgtcgctatcaatgaagaaatcttcatctgttggccgtatatactcattactctgggttagcagaacaagctttatagcatcaattacagccgtctttccagaatcattttcaccaatcaatgcgtttaagcctttgtgaaaggtaattgataaacccggttcattatcatttgacttgaattttctaaaattataaagcttcaattcagatactatcattttgccagtctccttccttcaaattttccactgcatgagcatctcttgcacagcctactaactgtgtcgtttctcctaactttccggagtcatccccatagttgtcgcacacttgtcatctcatgttttaccagggtctgacaccttatatcttaaaagtccgcatcatcccaatcgtcaaataaaacagacacattaccaattagagataacaattcatgacgctcttttctttcgtcattatcctctatctcttcgtgtaagtcatcaatccaatcaataagagaatcattcacgttaccctcacataaatccgccagataatcatttataagtgcatcatcaaattctaatgaatgcatttcattgaatagttttaaaacaccactatcaccatggtctttatataaatgaattagcaattcttttacagcttcctgttctaaaatcaactgtttatataaacttctcctttgagtagaccagaaaacccttgatgcatttgagtatgaatcaagttcgtaagtataagtgcctatctccctagctttttcgtcaatgagactataataataattcgcagtttttcctaattcgtttatgtaataacgcttgaatggttcaaactgaaccgcagtacatagttcttcaaaatcaaactttccattttgtttcttcaagaaaccgataaataatgatttcagttttttactattatatccaggtacatagttcgcatatcgataattgttataatattcactaaataatcctaagaggctccttccatttgccgatatacattttcctgaatattcttttacatgcttttccagttcattgtgattatgtttttttaagcactcgggaactgtacttttatccataggatttgggatagataaacacagataaattttctgtagacgttctattcccactgcaccattataaagaatcgaattcagctcgtagtcattatagaggttgcgcaatgccatcgcttttctcgcagaatcataaatgaactcacctgcgattcctaattcgtgtgccatattaatacttttaaaatcccatatttcattaataaacactcaattcacctttatccttttttaagaaagtttattcttttttatctatacatcttcatcatcttcaaattgatgtttccacacatcgtcaactatcggtcagcttcttcaagctgtctatcacccgccacgcagaggctgttgacttggatgactaccgcacaggttgtgcggcgaaaataaatattgcaatttaatatagcattaaaaatttattggcagatgcctaacctcttctaccttatatcacgttctaaacacagtaacatcttttaatttcaagcgttttactaattcaaccaggcgtttcatgtcctcatagctgtgataacctatactccactttgcattacaatatttatttacctcatcaaaatatggataatcgacctctgataaggagtggccaattacatatacttcctctatcgcactcaagccctcaaagaaagcactatgtttctttattatttcactgcatttctttgtggttgactcatcataccaggctgcttctctggcagctgtttccattgcagattcaaagatgtatctcttatacggatttttaaatttaatgggcttcagttctactttatcccattgttcttcttcaaggcctggaacatgtcctaaaatgagttcatccggcttaccttttttacgattttttcgacatccatgtatatagcacacctttttcgcaccatacaagtcttcaataaactctgtataattgaaagaaagcactttataattgccatgtaatacagaaaatggtctgcttgtcccctctacagtcaaagtctttatccactttttaaatctctgatttaattctcttggaatattgaatgttgggcctattgcagtttcgacagccgcaaagaaatcagcagcttgtgcatccggatcatatgcaccaaaatcatcaagccacatatccaagacggtgggatttaagaacatactataattgagtctgccaagggaatcctctaaatttgaccacaaatcccccggcacatccaaatacgtctccatttcataacggagcgaactgttctttccaatagtcttttgaaaatcccagtaggaagatttcacaccatgcatgatatcgaatccatttccaataataacaagtgaatgctccggattttcgaatttcaattccccaagcgatattttctggtatggaagagacttcaaaagaatagatagttttctttcagcctcttcccatttcttttgtgcctcggcttctttttttgctgcctttcttgcttttctgcattccggacaccttttgggcatttcgtaattcatcgatgtatagaaattttgttctttagaagaaaaatcaaattctttgccacattctttacatataatattcatagtatttattcccctacataatatcgttttctagctacaaccccggcagtccagcatccaacacatttcacctatagaatatcatacttcttcaaaagttcaatccgtctcttgctgattttcatactctctgctgccgcacccctttttattcctaatcacctactcctctaattttctattaatttcctctatccacccgctgtcatcactctcaaacagtttaataaactttccaaaattactgcttccagtaacagtatcatccccctttacatcaccttttatactaagcaaggaattaattaactctggatcaggcagtgctccaagagcacctttcctatatttttccataatgtccgtcgtatctctcactccctgctgtgctgtaaaatcagcaagcgaataaacatatacaccatcctcatccttatgaacaaaccaaatctgttccttcctgaacattctcttgcaatccataagattaatatcatgaactgtaaatatcatctgtgcattcgtattcaattcgttattaaacatcgctacaatggctctggtaagcttaaaatgaatactgctatccaattcatctacaacaagaattctgccttgttcaagtgcctcaatgacataacttgcaatagccgcaatcttctttgttcctgtagaatcaaataacatacttggaacatggactcccttatatgtggaaaccagtctgatttgatccatgatattctcaggtatatcaagcaccttctcttctggtttctcgtcaccttctccggctttgacctgaatcttatccatatctacatattcaaagttatccatatataagtccgcattctttatgaactcaacaactttctgctgcaactgattcttattcttcataagttcaatggtatgtttcattggtatattattcatattgataatatcaattttttctgcaaaaccaataagaatctgcttcatctcatctatgtaatcaaatttacttgtatctattaaatagcataacaagttgttctttgatacaataggaatcatcgcctgtacatcttcatcaacgcactcatatatatcttcaacactatcttttttcagccagcatacttctttttcattgttataatgatctttaaaaatttctgaaaactcttcatatatatattcttctttttgaacatcgtatttaaaatcataagaaaactttcttcctgatgccataaatgtcacacccaactcacatacaccactatctgtaaatatattaggcatcagtccactcttcttatttagaagtactctctttacggctctaatgcacttaacaagacaagttttacccgcattattcggaccatagattcccactgttttaagcacattaaaattattctctttatgaacattagctccaaactttttgtttcgcatatccgctttcatagaaaatgtaatctcatcctcaaaagcatagcagttttttgctcttacttctataatcatggctcattcctccaagtcacttttctctttatcattattatatcatcaattattttttatgcaactttttttcacaaaaaatgtccaattgttatttgaaggtaagtacgtttacactggaaggatttcgcactaaagagaagaaataaaatatgccgccctgatgggcggcttattttgaaaatcaaggtacggattacctacttacaatatagaaacaagctgtaatttttagcggtttcagctacttttttggggatttttccggctgtttggctgagtttagggtgctgttttagaagttttagggatggtatttccctgatactcccctccgaaaaccgcagttccatgtcgcagatctccagtgcggcctttctgtgggttacgatcaggaccgtcttttctgtcatctcgcgcagatttgacaacacctttttctccgtctcttcatccaatgcactggtagattcatccagcaccaggatcgggcggtttgcgtatatggcacgagctatggcgattctttgcatctgaccttctgaaagtcctgcacccctttcaccaagaaaggtgtccagtccctgcgggagtttcatcacaaaatcccgggcttctgcgatctgaagggcatgccagatccgctcttctttcttttttgtttgcattccaaacgtcacaactttcctgattgttccgctcatcagtgcatttccctacggtacataagcaaataaactgcgccactttgaagtcatcggttccgtttgtgtctccaccttcagctgatactctccctgatccagatgatacagacacatcaaaacctttagtaacgtacttttcccgcagcccgagggtcctgtcagagcgacataaacgcctttgggaatctcaagattgatatgttccagcaccaccgggcgcgtgtccttttgatcactctctgaagaaatatacgagaattttgcatctttcagcaccagacctttcagtttttttctgtaaaattcctgtatctgttctgctgttttcttctctccacctatctgatccaccggatactcttctatctcccggatacgctccgcacttgcaagcatgccatagtactgcgggaaaaatccggtaagactggcaaacggagactgcagctgaccaatcaattgaatcatcgccatcaacgttccatatgtgattgttcctgtcagaattccataaccaccgacagctgttccgaccacataagctacgttcatagctccgttaaatccgctgttacaaagatttgatatatgattccgacgcatccgggccttcttatgtccggccatcttttcattcgcattctctacgatctgcttttcctttccaaaaacgcggatcaccagcatacctgccaggctctcctgcaaaaaaatccgcagatttccatctgcttcctgtacctgtttatgcagttttttaagaattttcctgaataccgcattgacaccaagcaataacagaccgacaggcaaaatcagatacccaaacatcggatacatcatgatcagcaaaatcaatgctccgagcagacggatcagcatacccgtaatcccaggtgtcatctgtgtcattccctcagcaacaacaaccgtatccgaagtcaggcggttcatccattccccggaatgtctgccggatattttttcataatcacatttgaacaaaaaaagaaaacaggcggttcttaaaacaattttccagtaatgcctgtgtatattcccggagaaaacggttacatgctcccatggaaacctgaaagataaccaaagctataaacagtaaaatccaacgattcagattgcttcggcttcctgccattgccgcatccacgatcccccggaaaatcagtgcgtatgaaatactgccgagactcaatgctgtctggacaatcaccagtaatacaatatattttttgttttttccggataccctgccaagccattgaagcgttgcacgatcagattcttttccctgtttcattactctttcctgctctcttcccctgtcattgtctcaaaactacaccggactgcttcctctgagatgtcacatttcatcgcataaaatgaaacatttccaaacattttgtccagtaattccagtatcttcccggccgtctgcggatccgacggataatacacctggcgcatcagtaacggcattgcttccgaaggtgtaagcctgcggatttcattctgactgcctctttgaagaaagcagatcccctgcaatacaaacggtatggccagccttccagatcaatccttcgttctccacgtatcacctcagaaagcacccctatgatctgttcatctgtaataccatactcccgtttcaggcaattatctccacagatcacataactgtccggtcctacttttacgatccgatgaagaacataatcctttccccgtttatataaaggaatatcatattttttcaatcggccggtcaccggtcgaatcacaattgtatctcttcggtgtctcaacatcgggtacatgcttactccggcagtagtactgacgaagactccttccttttcaaatacctcttcgatatgcagtggctgattcacgcttcgataccccccacctcatacatcttctgaatcatctgtcgtacatcatgtgccgcgctctcctgctccacctcatactgatccgtgatcttctttacaatctcttgttctgtcaatccggtcttttccagttcctttcggatccattgccagtccatcgatgactttttctgtaaaaatacatactcatctacgagcgtacaatgataggatattgacaaaatccaatcatatagtataatgatgatagggaatttcaaaaaagcaatcattaattggggagggattcataattttggacgttacgaaaaatgatattgacatttacttatcagaagtaaaggagtcaatcagaaataacagatatcgaattgaacaaaatcctcgtagacaggataatgccaatctattcttagactacattatagatgaatcaatggctaaagatatattgcttggtctaacagcaactgatttctcagaagtgcgtcacaacgagcatagaggatttgaacatgagttactatatatttttggtaaagatgttaagcttgtagaaagatttggaaattctgataagttagtttcactttacataaaatttaacaagttggaaaactgctatgtaattgtcgtatctctacatgagcagaaatatccacttaaatactatttcaaatagaaagttgataggaggaatcatcatggcagaaaaaaaacggatggatttttgcacgacatgcaggaaagacaccacatacacattagaaaaaatcaacattaataaaatcataaaagataaagaatacaacttcagcattactgctgcggtatgcgatgaatgtggcgaagcaatggctgtacctggcctgattgacaaaaatattcaggaaatagatgaacaataccgagcttatgagaatttagtatccattgatgaaattgagaaattaatgaaaatatataaaattggaaaggctccgttgtcattggcactgggatttggagaggttaccattacgagatacctttccggacaaattccttccaaagaatactctgacattattagagcagccatctcttccccatcgtatatgaaacagaaactgctagaaaataaagggaaaatagcatctgctgcttataacaaatctatggaagcagctacacaacttgaaaaccttttttctgtttctgataaaatgttacgagttatatcttgtgtatttgatcagcttgaagaagttactccccttatgttacagaaattactttattttattcagggaatatcttatgcactcaacagaacaccgatgtttcccgaaacctgtcaggcttgggtacatggaccagtataccctgttgtatatgatctgttccgggatttcaaatacaatccgattgaggatgcccgtttcgcaatctttaatggtattgaagacaacctcactgctgatgaacacttaattattgatttagtggtcaatacgtttggcgaatatggcggaaaggtacttgaaagaatcactcattcagaatctccttggaaagctgccagagctggttatagtgatggtattccttctcacgagccgattcctgacgaaaatatcaaatcatattttcaggcaatgaatgaaaaatatgacttttcttccgaatctggaattaagcattatatcaatgatattttacaataatttcaccgccccctcttttataaagggattggttaatccaacattaatacgaagaaaacccaaaacagcaagtccgaaaaatgggcttgccgtttttttgtgtatgggcatgggtggatgcggaggatagtttggaagtgttttagactcctctctctatagttacaaacggatggctcacacgagccatccgccttttggagttaatattactcaaattttgttgtatttataggtggtaaaactattggagtcattcctggttgtgtagttaataaagtaacctgactacgaataaatgggaacattatcgcaactgtattagtttttacgatattctcttccatttcatacgtttcagcctcatactcaaaatgtgcttttgcaataattgacaccgataaatcagatttctgtactgacaataccaattctacatcatattcatgctcatcagtttttgtaatattacgttgtaaatcagctttacattcaccgttttccactttacatgcccgttctacagaacaagaactaaaatataaattattcatttttaaattagatttcatcttacttaaattcatatatacctctttatgcagctagtccaacattactactatatatgacgctcattccatcatcaatagcaaattgcacatcaatagaaatattttcgtaactcacatcactctcaaaaccatcaaccatttctacacaattcttatcattaagaaaactagctccaaaaatactagcaaaagtatctggcttgtcgcacttcttcacagaaatttcgcaatcaaattgttcttttgcgtatcttataaaatcgtctaataccattttttccatctgcttatcctccttaatgaatattttcaattatatctttatctttaacacaatatatggtttctataccaaatatcatatccaaactatttgaaaattctatggcatgttcatacattggctgtggtcgctgtctaaaatttcctataaccaattttttgtcatttctatctgcataataactaataaaaagtgctcttagcgtaataattttttctacatcttctattccagataattcaaacgagtattcaccaaacagttggcttattccttcttcaaaatcacataaatctttgtatgcacgcaaatcaaagattttatcatcatctatatcaataatatcggcgaaaagaactgctggcttaaattttttgccagtttcctttcttatttcctcacattttctgtttgcagcccaccatgcctttttcttaatatcataaaaatagatgccactcccacaccagctatcagaacgacctcgtatctcaaaaccattagcttttattttctcagctgattcctcatctgttccatgactcaattctctatatgtttctttatacatcccgctcatcccctaataataaatcatcaactaggaattaacattatacacccacccatgaattttttctacatattttttactattctatactatgttcattttacaatttatattttcccttgtatagtcagaacatacggtcttttcaaaatctcatatctcctttaacaattgaaatttttaattatccgcactttctcgtcattctctgtttaaatcaaatattttttcgctcttcatagtataaacaatatttttatattgtgaatataatattagctcccctccaaacaaatacgcttaaaatcttttagattctacatttatcctaatatcacaccattctttcaatttttctatgccggagacatactctcgcccagcctcactatcatacaatttctcatctacctctacatacaaaaaattatcatttaaactatattctattgaaattaaatttagcacgtcttcattacgataattcggaaactttttgcttggttcaattgtatccgctacacaaagaataaacaatagtggattgtctttatatgatatacctaaaatgaaattttaaattccaccaccatttggtggtagaatttactcccgcacagtaaaggtttactctttcatataaaaatggtaaggatatctttctttctgacagcagtagaaagaaggatatccatgagtaaatatattccaggaaactagaagcacctttcccttgaagaccgtatctatatcgaaaatgaactgaacaagggagaaacctttaagaacattgcccgctcttttgtattcatcggttctagagccggtataaacatgacaaaacatgaattacgcaaaaaggatggcattgtttctcctgaatcgttgtactaaaggcgctgtccggcttatttttgaccgtttagaaaaacgtatgggcacctatgagttcttatctgtctttgaatatatcttgacagacagaggttcagaattcggagatcctgtcgctcttgaaacaggactggatgaaattcagcgtaccagcatctactattgtgatcccatgcgtagcggacaaaaaggaggtcttgagcaggctcacaccatgcttcgcatggtgcttcccaaaggaactagttttgaatttttgacacaatgggatgtgaatctaatcgtgaatcacatcaactccactccaagggaaagtcttaatggaagcacgccttatgacgccgcattagagacactcggaaaagaaaccctaaacgcatttcagcttaagcgcattgaccctgatttggtcaatctaacgcctaagctgattcgcttcaaccattaacaaccacttagaaatctgctgtcggactggaaattaaactttcacattttcctcacatgaccggtggaatttagtctcgcacactaccttccagtggtccgtttgtcataccatcaaatcagttttttccaagaagttactcctattataacagaaataagcgttttgagcttataaaactcttagaaaatcaagaacttttaaatgagtgtggaatttacttctgcactggaatttactttttcaagttagctttgaaatcggcattctgcccataaacacaacgctttgtaaaagggctgcgatggttcggatatctgtctccgcgaaacggtgagtacggattaaagtcgcgcaaaggtcataatacgcgctcctgggatacgctgatggacttacatgtattgtcagtataccactttcttcatgatgaaaagtggttaaaaatttctactttttgcacaaacattatgtctgatattccggcggttctgccggccggacagatttcttcggtgtgatggtaagtccctccatcagccagcggaactgtctgggagtaagggcctgcacatcagattccgtgcggggccagatgaactttccgttttcaagccttttatataaaagcaaaaaaccgtcctgttcccagacgagccctttgatgcggtctgctttccgtccacagaaaagatacaatgtatccggaacataaggtaaatttccggtcctggaatttatgacagatgcaagcgtatcaatcccggatcgtaaatcggtgtatccgcagacgatataaatctgtttgaaacatgtggcgtcatttaacatcgcgaatcacctgcagtacctttgtgagcagttcagatgatgtcagctctgtaacacaaagagtgatatcatttacttttatttctaaagaagcggaaacagattgcctcgattgtatctgtgttgcatcagccggaatctccatggtcatcagttctgccggaaccggaacaactgactgctctgcaggttctttcggaatcgcttccagacaggctttgcgaacctgtttcatccggtaataataattcgctttcgtgatggagtggctgttacaccattcatcaacagacattccgactggacgctggttacattcacggatcatcgatgcccattcgcgaagacggtattggcgtacaactaaacttgttttactcatagacttaacctccacataggagtcaaaaaagttgaggctcaacttttttgactcagtttaaatagttaagtcaattttctcaaagaaggaggcgtacttctatatacttgctatggagcgtttaccgaaagattccctattgttctgtattatttgaaatcatcatcatcaaaagttcagctactttttcttctgcatccttatctttcaaatattttacgtctgttgcaaaagtcgatactaagtctccaacaacattattataattatatgttgcgtcattattcacaaattcaattgagttaaatggagaagaaattgctttatacaaacacttaaccgcatttgcattaatagaaatatctctataatttctcaattttgcaatatgacataatgctaatgctgcagtatataatgaatgtgcagcagaaatcattattttctcattctcatggctctcatatcttttttcaaatgagctattagaaatacttgcatctctatatgccatctcaagccatttttccttgtctttttcctcagttgatttatacgcagatctaatatagcatttagccctctgatgtaaataatttggatctgtcgctaaaatatcatttaaactttgatatatatctcttattatttttgttccttgagatctaaatatttggaaaatattatcaaataagatgtaatccttatatggtgcgtacttttctcctcctaatatataagtgtagggtttagataccccaacagccagttgggttctatccctcttattgctaaagctgtacaatgatgaggtatcggtctgacagtattctccttggactcaatagacgtccgtatgaaagccagtcagccagcctatcatttgcagccgttcgatttatgcaggttggactgccctgtgcacgtccgtttgataccccaggagattgaataagcaatgagaaatagctggacaccatacaaattcactttcggaggtacgagaatgtacaacgcagtaggtattgatgtatcaaaaggcaagagcaccgtcgccgtcctgcaaccagcaggtgttattattcgtaagccttttaatgttaatcacacatcaagtgaactggatgagcttgccaaatacattggcagtctggaaggtgaaacccgtgttgttttggaatgcaccgggcgttaccatgaaccagtggtaaaaactctttctgaagccggtttgtttgtcagtgctgtcaatccacatctgatcaagaactttggcaacaactccatccgcaaagtcaaatccgaccctgctgatgcgaagaagattgcacgctatactcttgacaactggatagaactgcgacagtattcaagtatggataatacacgtactaaattaaaaactttaaactcacaattcagcttcttcatgaagcaaaaggttgccgctaaggctaacctgattgcactattggataatacctatcctggtgtcaataaactctttgacagccctgtccgcgatgatggcagtgaaaaatgggtggattatgcttactcattctggcatgtggattgtgtccgcaaaattggattaaaaacattcacggaacgctatcaagcattctgtaaaaagcatcactataatttccaaccagcaaaaccagcggaactatttcttgcatccaaagaccttattgctgtctttccaaaagaagcgtcttataaactgcttattcagcaaagcattcagcagcttaatcttgcttcttcccatgtagaagaactacgttcaaagatgaatgaacttgcttctactctgcccgaatacacaacggtaatgggcatgtatggcgtgggaaaaacttttggtccccagcttatagcagaaataggtgatatttccaatttctcacatcgtgaagcattgactgcttttgccggagtagacccaggtgtggatcagtcaggcacccacaattcaaagagtaataaagcatctaaatgcggttccaaccgtctaagaaagactttgtttcaaatcatgtctacactgcttcaaacagctcctgaagatgataaggtatatcaatttcttgtcaagaagcgtgcagaaggaaagccttactatgtttacatgactgctggggctaataagttcctgcgtatctattacggcaaggtcaaggaatgcatccgtaatttagagcaataaccaagtctaaactcatttttcttcaaaccggcaaatatggcggttcaaaacttgtgcccaaaatcacaatcataaaaataattcattttactattgactttttattagcaggctttcatcaaatcaggttttccatttatttcaattaattttccgataatataccgatatgcttcaataattttttctcgaccttttctactttttgccagaatatctaattgattaaataaccaatactctgcatttactacatacttcaatggagaattatttgcagcactcatctcaaatacccatgtgctttctttctcaattaacggcatggcctttttgcattgcatttcaaattcctcaacaagatcaagattaatcgcatccgaagcatacacttttccaagtgttgccaatacaattaaactagatacctgacgtacattatccgttaatggcgaaatctgactaaatttattcttttgaatcaataaattacttgcattaattatattgtcagcaatagatttgttttcagaaaaaactcccaatgatgaagtcaccaaataattattaatttcgtctgttttcggttttgaaaaacgattactaatttctaattgtggtatttcatcatcttctagatgttcgttcatcttcattaaaactaaaagtccagacaaatctctattacttttattctcaataattataatactattgcttttaactacgcgttcactagttgttaatataatttcttctatttgctttatcgaaagtactttactgtcaaaaatagtaagacagttttctttattaagcaaaagcgttaaagtttcattgtttattctatcttttgatctaaatgcatacacttcacgatctctaactcttctaattatatcgtaagacacatatgtcttaccgctacaccctcgtcctactacaatttgagttcctttactatttatattttcaacaattttatcagtaacacttctagacacaaaaaagcttggataaattgcaatctttgaattatttaaaatactttttccttgaaacaagtaaggacaattcagttcgaaacccgtccccaaagttttgaattcatatgtactaaattgttctaactcgtctggcgtaatacataatgactgatgaaatgcatctgtcattttttcatatatatcatcataggattcgaaaactatacaatgtgtaattccaaatgcttctaattttgttttctgcaataaagttggtatctgagttgagcaataatatctattattattattgtcgtttgccatagacgttgaaaacaacaaatcaatttcgtctgacaaactacaaccgatatataataaatttaaatattcataatcatgtgtaagtttttttaacaaagacacgttcttttttatactaacaacatattgcttttgatcaaatatttcacaatttgaatcctcatatttcaaaatatcttttatatccccatggagtttaattacacacttctcctgttcaaaaattgaatttctaatgtctctattggcatataacaccgttttaaactcactattattttctatagcatcatcaatattcaaagtataaatatagggccaatctatttttaaaaaattcttttttacattttctaattttacatttgtaaacttatttaatagatatgactgttgcttttctgcctgaaccattttgtgatagatagacgatatagatgaaaaactttcattatttaattcttttactttcatctcgtcaggattttgatctacaatttgcgcaatcatgtaattgtaataatcttctcctgacggaaccttaccagaacgtgcaatacaatcccttgtaaacccagacccgattacaggtattattgtctttcgcctcatcatttgaattatttcattgcttacttcatcatatgaaacacattgtatcattttgttctctcctcttattaacttaagtaatcctgtatttatatttatctcttctttaaaaaagagaatacccacattttctattctagtcaactagatgtgacgttataaattcgctcaatagtcattattaaaaattgatttttcccaatcccaaaagcacccttgtgcttttccatcccatcccttactaacaattgttttgcaaaaataaagtttttctccatgctttgctataatttacatttttattttcaaatcactatttgacacaatatctaaacattggcttaaccgcagaaatctgctgttaagccacatcaaacatcataaacgctcagaatttacagaaaaatttcaaaccaaagacttatttatattaacagtttatatcttttattttatattctcatgtatttgaagcttctctaactctcaaacatttatcccataagcctaatcttattattccatgtacgcgaatgaactattgcaggatgttcgcatagatatcctggtattaattctttcacaaactgttcatatgatgcaaattgatttaacagttcattccattttattaataagtatgggattttcctttaatgctgcaatatttccaactttgtgttcacatacaggccacgatccatcatgattttctggaactaaaagcaaatcttcttcgatattaagattgagttttctcatgaattcaatcaaaaactttttagccttttaaaaatcagtagtctctttaatgtattatcagtacatttatacattgatttttcactcctgtaagggtacttttctatagaaaactgcacgtaaaaagatttgattacttataaaaccgtgcactttattatatcatttttgagtaaaaaatgcagtaaaatcaatggcttcaagctggttttttcattaatcagcagacactaattaaaagtctctggaaaagtgcgttttttttaaaataaaaatttcgatatagtttctgataaatttccctgttaaatatcaaattatgtgcgccatgattatgccttatttttgcttaagttgacgctattttgaccacattggtgcctgacccttcctactcttcactcctcaacacgcatattgtaaatacgctttcttatttccgtagacgaaacgttacttctcttaatataaattgtatcaaccccatactccttttttaatcgtgccgcatccctaatataaatggcttcctgctgatgatcatctcccacaaacattacatcaaacttatatttatagtaagcagcaactttatccaaatctgtttcttcaacaactttgtcaacatatctaatggcacttacaattcgaatcctttcggaataacttaaaacagactctctccctttacgttctctcataaactcatctgttccaactgcaacgattagttgctcgcactgagacttcgccaactccaaaatcttgatatgtccttcgtgaagaatatcaaaaaaacccgctacaaatcctgttttgtactttttcattttttctctccaatttcgtaatgataacaattttcaaactgcgccagttgcatttttaccatttcttttacttcttctaaagtcttatctttcaagtttgtctcactgtcattcctcattctacagaaactcaataatccatcagccctcatagtcagactcataattcctgtcgcacagggtttatttattccagagtgaactttatatgaatccggataatattcacaaagttggcatgcttcgctgtacgttcgccttggagtaaccgaattctctttgttcatgtgatctacaatcgttaaagtgcagccatcatgaataaatcgtttcatatgaatccctttattattatgcacataaagaccggtttctgcataattttttttccgcatgctctcaatcaattcatttaattccgtttcaacatcatctacagaaactcttccgccaaagtcatttatcgtgagaaccttgagtccaacgagtttcatacggtgaacataatcataaattatctcaatctctttcacattctgctttgttgcgacaaaattcaattcaactttaaaacccttatttttagcgaacgctatgctatccaatactctttgcagttcatcggttcctgtcatttctttaaatgttgccgcattcatagtatccaaactgatttttaataaaagaatatttttaatagattcccatacttccggagctatttcatagcattcttttagcaaaagcccatttgtgcacaaaactattttttcataaccttctaattttgcacactgcaatgtttccaataacctatccgaatacaataagggttcgcctccggtaatccgtactactttcttttctgtccacctatttttcctataataatctgcataggaggtcagtaaatacttaatctgagtaatatcacataattcctcgcactcttttaaattttcaccaccatccggacaatatcgacaattcatattacatcgggaggcaagattgattaccagtgacggtttcaacgtaaatctgtccaaaacaaaactacagcgatctggcacaacaggagaaaagtttgtgcttgaattctcccatgcagaatcaaagtaatccctgagactcctatacagggcagatttattcgtgtaacaatacatgggagacaaagaacttcgttctcttttataatacccaaaataaacgtaatgatctgttataatgaatcgaaatagcagcggttgttcatggaaccggagactccatgacggtatagtagggaaattgtctcttaacttttttatatcctgataatttattttccattgtgcttctaattttaactgtgaagaaaattccggtacactacgcaaacgtttttcgatattggggctataagggtctgaaaccagcaatctgcaagcaatccgtcctgctttttcatataaggcatccgcaattttagaattttgtcttaaaaatgtaccccctcgtaatccaaaaaaatccagcctactgcttgttttaatctctttctcaacatcatttcccatatcataaatcgtattataaattttagggatatcataagaattacgaatcattccatccaatgtactcgcctgataacttccattcggaaaacttcgtaacaatccagatgccttttcccattttgaattatttcggtattcgtacaattcaattttcaacggaccatccttcatatatttccccaccataaatacaggattagaatagctgtcggcaagggcgcatccgcaggtaaactgtggaattccctccatgggtagcctattctcgcttattgcttctgtcagtatattcataccaggcgcatgattatgcccacaaaataccattttcacattgttctgcacaagccaatgttgaaaacgtctcccatcatctgcctgaagccactcaactccatgatgcatcatgacaatattaatcttttcatccttgggtatctggtcactaagatccgccaattcagaaaatccgacaataagattaccataatctttatcatccttagacaatagacaagaatcaatctcaatgactctaaaatcatccacatctttaaaaaagaatggtttatatctctcactataaaccaaactatataattcacggaaattcacataacccgccaaacaattttccacttccggcaatacaccatgttcacgataatttttaattgctgcatttcttattgcattatctctatcaatgtcatgatttccagggcagattataatcctgtccttttctataccacatgacttacctatttcctgtatgaatgctctacttttctccacatccccatgattcctatgcaggcaatctccagtaatcaaaataaatgaaatatcttcttcctcattttctttttttaaaactttaagcaattctcttcgtgcggttttagttgtacagtttttaaaatccatatgcagatcagaaagaaccacccacttcatctcataatcctccttcttttgtccaaacgtaaaaacattttaaatactatatagcctatataaaacaaaatttctcaattcaatctttctcacaagtgatgcccgttgacaacttgttaacagtacctgaccctttctattttttaatgcttttttcaaagcattgatgaccattctgatatcaagcgtatcatcaacttcccagccgacaatacagcggctgtgccagtcgataacagctgtcagatataaaaagccgtgtttgatcggaatatatgtaatatcaatagaccgtgcttgattttgcttgtctatgacggcatttctaaggagataaggacataccgctgattgtcaaacacatatgtattcattatagtacttttttccatacaaaattttaatattatataacctggccgtttactatactgtaagtttttcctgtggaatccttatactttccgctatagccaaaatccacttttccgcatttacaataccagcttccatttgcatttgaggcaattccattataattaaaatcaacttttccattacggattacccaccagccatttgagtttggtgctacagtgttcttattaaaatcgaccttaccatcagtcccgatgtaccaccagccattactgttctgctgcacggtctcctgacccgtctgtacttttccat

SEQ ID NO: 660 - DNA, 8310 bp, Agathobacter rectalis
  source 1..8310: mol_type = genomic DNA
attcatgatataaagaatcctttggcaacggttaaattgatttgtgataataatcgttcagaagcgactacaaaaatattgattgaaacttctagaatcaataattatatagagcaggcattatattatgctagaagtgccaatgtagaaaaagattatttaattagagaagttcttctttctgagattatttcaaaggttttagttaaaaataagcagtttttgatagagaatggaactcatattttgatgaatgactgcaataattctgttttaacagatgaaaaatggctggaattcattgtcatgcaaattatcaataatgctgtacaatataaatctaatgatattttggaactcaaaatttgtagcatagaatctaataatggtgttaaattgattatcagtgataatggaattgggattttagaatcagacattcctagaatttttgacaaaggatatacagggaaaaatggaagaaaaaataatagttctacaggattggggttatatttgtgtaagaaattgtgtgacaaattgagtgttgatatatctattgagtctgagattggaagagggacaaaggttactttactgtttcaaagaggaaatatattaaggatgcaggcatgaatgatgtctgcatcccttacatttttgtaagaagtttgtaagataaatcactataaattcaaaagaaataacgataaaataaaacttagaaaagagataaggaggctaagtcaagttatggaaaatagtagcgttttgttacatattcataatatccaaaagtactatggaagtaataatagtaacattgtaaaagctctggatgatataagttttgatgttcaaaaaggagaatttcttggaattatgggttcttccggagctggaaaaagcactttactaaactgcatttcgactattgacagtgtaagtgcagggaaaattatattggacggaaaagaagttaacttattaaaagataaaatgttagcacgttttagaagggaaaatttgggctttatttttcaggattttagtcttctcgataacttaacaatttatgataatattgcattagctttaactattaataatgtaccaaccgatgtaatcaagaaaaaagtagaacatgtagcaaaacagttgggaatttatgagattttgcaacattatccatatgaaacatccggtggacagaagcaaaggtgtgcatgtgctagggcaattattaatgagcctaaattagttttagcggatgaaccaacaggggctttggatagccattcagcacaaatgcttttagaaactatgggggatatgaacgaaaaattaaaaaccacttttattatggtaacacatgacgcactttcggcaagctatgccaaaagagttatttttttgaaagatggaaagatttattgtgaattgcagagaggagaaaaagaacgaaggaagttctttaatgaaattttagacagcatagcattacttggaggtgagagaaaatatgtatcttaaactgataaatagtaatgtaaaaaaaacattgcaggattatcagatatatattattacattggttgtcagttctgcattgtttttttcattcatttctttaagtagtccttgcaatacaattattgcggatggaacgaaatattctgatgctatgtttcgccaaacaataaatctaacagtaggtcttgtatctcttattttctttgtgttggttaactatgtgaataatcatatgataaaaagaagagcaaaagaattttctatatatatgcttttgggaatggagcaaaaaaaaattgcctttttgtattttgtggaaacgcttgaagttggtttattggcaattctgataggaactatagcaggaacacttttatcaggtgcattaacgagtatagttatacttgcaacagggggagactttgattacaaattaggattctatccagataccttttttaagacaatgttgttttttatttttgtttttattttagttggtgtttttaatactacaaagttgtcaaaaactaagctgattaatcttctcaatgcagataaaacagtagaaggacatttacaaaataagaaaaaatatttcataagtcttatagtaactattatatcttttgcatcagcagtaataatgataaaagactatttatcaactggaagaggatatatgtcaaatattccatcagtggtaagcaataaatatcagcttattattggtattctacttgtttgtgggatcttttcaggatattatgctgtgtcatacattatttatgtagtgaaagagcgaagtaaacattacaaatacaaaaagttaaatggtgtatttattagtaatctatatgctcgttccgcttctaatgccaaagttattgcaagtgcaacaatagcaatcgctgtctcaattttaggttttgtagttgctcctgtattagcagatatatcagaggaatttttaaaatttagaatgccatatgatttaatgattaacaatagctacagatatattgataaaaagtctgatattccgcatatagatttttcttttgtgaatagaattttgaatgaacatggaatcaaagaatcagaaatatgccagcaggagggttattttgtatgggcctctaattttgaaaatatggaaacccgtgataataaatgggatatgccaagacttgcagtatcactttcagactataatcaaatgagaaagatggcaggtttgtccccaatagaacttgcagaggatgaatttgcattgcaagcaagtaatgaaattgatacggaaagtatgaaagctaaaatagaagctgctgaccatgagattactttagataatgggcaaaagataaaactatcagaaaatccaatatataatgatgcggtaggagaatacttatataattttggaaattcgacttcttttattttccctgacagtatatgtgaaaatcttgatatagcaaccacctgttattatgtgaatactgttgaaactataccaataagcatatgtaataaaattgaagacgaaataaagaaagaattcagagatgaatatacaatattatatagtaaatatgagacaaaatatcagtcagataaagattaccaggattttatagaaccgattcgttttgtgacacaggaaaaaaatgctgttaaactaaattcagtgtgtatgagacttttgggagtgtatattggtgtgattttctttgtgatttgtttgacggcactttctttacagcagctttctgatgcagaaaacaataagaaacaatatggaataatgtacaaactgggggtagaaaaaagcgatatatataagctgatcagaaagcagatatccatgttttttgcagtaccttgtttcttggctatttctggagcatgtgtaggcatttatgtatttatgattagatttgggcacaagatagtggcttatattggtacaaaagactttatgctgaatattgcaatcgcaatcgcaatgctattaataatatttgtgacatattttataggcactataaaagcatatcaacatagtgtatcagcagcatttgaacgaagttatcggaagcggatatagtaatagtaaagcctgcattttatgtgggctttattttttggaggaattgatgaaagatattataaaattaatcaaatatacggatatttcatatatgaaaaggcaaataggttgtatgatatttttgctattgaatacagtacttacattagtttacccgagttgtatcagcgttatcgttgatcaaggagtagcaaaggggagcattgaggatattataaaatattcgattttaatgttcgtattaggaattttgattatgattacaaattatgttcaacaaattaagtatgcaaaattgggaagagaaatatgtgaaattttaagaaatagaatgtttgaaaaactttgcaaaacaaattataaattttggtgcgaaaatcgtgtaggggatataattactatattagatacagatgtttctcttgttgaaaaaatcttgacatctataataagttgcgggatattaaatattttatattttagtggaattattatggtattacttttatgtaatgtcaaaacgggatttttaataacaatattggtgtttctttttgtgctgcttcagaaaaaaaatggaaaaaaagtaaaacgaggtatgtctgaattaagggagaagattggatggtttaattcagaaacacaagaaatgattcataatatgccagatatacaattaatttatccagaaaaggatctggttaatagttatatgcagcaaaatagattgacaaatatgtcatatatacagcaaacaaaaaatatgctagaagctaaaaatataggatggggatttaatatattgtctatttttagcgttcttcttataggaggatatgctgtattacgggaagatatatctgttggaatattatttagtatgatagtttatgtgcagcagttgtattctccagcagtagctttaggggaaacctataattcaataaaaaatgcccaaccaagcatactgaggattagcactttgttggaaaataaagaaatggtagaagaagctgatttttgcccagaaggttcattaaaaggcaatatcatttttaaaaatgtgacattttcttatgctcaaaatacagatcctgtatttcgaaatttgaatttatcattaaaagccggaaggatttatgggataactggtgataatggtatgggtaaaagtacatttatacgcttaattgcaggattatgtatgccagattccggaaatatctatattgatgatatagaaataaaaaaatataatgttgaatatttaagaaaacatataggatatttattacaaaaaccattattattaagaggcaagaatccaattgacaatatagatacgaaaagaatgatgaggtattttaatatgggaaagaaaaggtatttagaagaaaatgtgaaagggttgtctggtggtgaaagtcaaaagctggcgttagcatatctactgagtgacaaaacaaaggatatttatattttggacgaacctacagcttcggttgatttaaaaagtgaagaagtaatatgttcacagatacgtgacgctttaaaaggaaagacagctttaattattacacatagaagaagcatactaaaaatatgtgatgaagtaattgactttaataaagaagtatcttacaaaaacgtaagaaaaatgtaaggaaaatcgctattaatatatgctgtatagtaagcgatgaataaccacacgggtatccgaaccagggaaccctaaattggcaggttcccacgattctctggaagttccaggctatcatctatgattccggaacacttatcctgtacaaatatactccacggtagcagctgttctatgcctgagggctcatttttgtagtccggcatatacagaagcagggtgtaaagatacttgtaagcattcaggttgtttgcttttgctgtctcgacaagactcataacgattgcagttgctttcgcaccgtcaacagagtcatgaaacaggaagtttttacgcccggtggcgtaaacctttgcttttcgctcagcggaattgtttgagatttcacatcttccatccagaagataattcattaacgattccttatgattcaaggcatacttaaccgctttctccagtttgcttcctccggatggatccagcgtgtcaatccaggaccagaattcatcccagattggtgtttcttcttcaagacgttttgcttttctttcttccggagataactccttatacaaacgttccttgaagaacagacgattgcagaaggcgactcctttttcagcaggaagcagattttcatcttcctctgtagaaatgggttcatccagtacctgctccgagttgatatccagaagccggattcttttttgccttccttttggaacggcatcaaaaaatttacggcgtgcatgagccagacagcagataagaattacatcttcaatgcatccgtatgctgcataaccatcgcactgtatcattccatgaaagcctttcaggaattcaatcggatagacgcttgcccggcctggctgatattcatacagtgccaccggaggcttcccatcgcttccactttgataaatccacatgtaggatttctgagttgcctttcggccatcctcatgcaatacctgacatggaacttcgtctgcgtgaataaggtctcttcttaagagttcctcatgcagccggctgtaaatcggctccagatattcaagagctcctttgataaaccagcgagcctgcgtttcacggggaatgggaacaccactcatgccaaaatccatctcctgccggtaaaacggaagataaagtcccgctttccggtacataatcattgctacaagggatggtgatgccggactgtgtggaaacagagacgctggagcaggtgctgcaacaatcgttgtttcatcttcttcatgacagccgggacagcgcatcttctgctgaaggtaacggacccggaacagttttgcagggattactcttaattcctccctgacaaatgtgtatcccataggttctaacggggtaccacagtccggacaaaacttctgatcatccggcagtggacatttgacttcacagattggaagcgaagcataaagttcttctcgggaagcctttggcttgcgaggttttgaactctttttggttttggccggcggctcctttgcatcatcctctgatatatcttcagctatatcagactccttgtctgctggcaaagagatatttttggaatgctcgcttgaaataccaaagaatctccggtttaactcggcaatggtttcttccagatttgcaatggtctggcgcagatcccggatggtattctgcatgtcctcgccgttttttgtgaggagcgcaatcgtattattctgttgttcaatgattgtcagaaaagtgttgatatcactttgccggttgctgctgtttgacatgatttaccacctgtttatttctactgttattataaaaataaatcaggtttttcgcaaaccggctgattttatgcatggtcattttgaccaataaaatcctgtggatatctaacctgagagcctgtaattcaatggataattccggattttcaggttagatatccaccgtggaataagaaaacgggaggaatccgtccggtattccacaggtggagcaaaaatagaaaaaatgctgttgataagcctggtatgagtcgctttatgaccggaaaaaagtttttatttttctctgttttgtacaaacatcagaagtcttttttccggcttccagctttgattgccttgggctgatcgattgccagcccctccatgagccatcggaattcctgtcttgtaagctggcgtgcttccgaggcattgcgtggccactggaaacgaccgctgccatctaatcttttttgcatcaggacaaaaccatccttgtcgaagtgtaaagccttgattttccggcagtctcttccgcaaaagagaaacagggcattggagtatgggtcaaggtcgtagctgtcccgcacgatagccatgagtccatcaaaactctttctcatatcagtgcggccggtgattacaaaaatcttggaaacaccggacagatcgcctaacataacttttgcagagccgttagcgtttgaacaattgtagactctgccgcagcattggtgatttcaatctgaatcccatgcattgagattttaatcgcagttgcagtaatctcctctgaactacaattcattggtaattcagatacaggattgaaattcagttccacaacttcctgcttctgacagggaatcacggcaccgaccgtagctggtggaatactgcatgctttattgcgaagtcgtttgacatggtaataaaaagtactgataccgatttggtgctccatgcaccagtccttatcagagagcccgcttgaccggcattcgctaatcaggtccagccacttttcatcagagtagtgcagtctttttgaactcatagtaattcactcctaaaggttattcagagtgaattcaaccggaatcaatcacagttagagcaaacggctccaactacaaatgcagctgatccagagagatactcactcctgaagtgattatctcatgaaaagttggtggcgacaaaccgtgcgattatacatcgcttac

SEQ ID NO: 661 - DNA, 2528 bp, Agathobacter rectalis
  source 1..2528: mol_type = genomic DNA
ggttaatcctgatagtgataatgccctttcgaaagcactgtatgaagttacaaatattatagatgattattcaattattagaataataatttcaggttctgtgaagcatgaagaatatattaataaagaagaaatatatagggagtgtttgggaagattcttgacatatgaaaaggaagatacggagcttagtgaagaaataacagtcgataaaataagaaatgaatttgctgaaacaagctttactgcaaaatttatggaagggcttataacaaatcctacggagttgcaaatggcatatcaattaattcaaaaatgtaaagaataaagggaaggtagggcttaaataatgaaaataaatagtgtagaatgtgaacagtttgcgggactgcaagataaaaaaattgaatttaaaagtggattaaatataatcacaggagacaatgaatgtggaaaaagtacaattgttgacttgatttatactcttttttttaaaagttctaaactagatggaagatgtgatgcggaatttattgataagtactttccgaaaagagttaatggacttgatggagatgtaatcgatggaacaatcatatttgaaacagaagatggaatttataagttaaagaaggagtgggaaaaaggggaaggtagttgcagacttacgttgcctgacggaacatcgattaagaaaatgtcgacaatatctgcacttatgaatgatatgcttaaacatagagctggtgtttatagtgagatagtttttgcatctcaaaaaagaaaccaaattgcaattgagagtattatgaaatcaataggcaaaaagagtgacccactttctgatacaaaagaagacatgaaatctatattgacacaggcagttctggaaacaggtggagtatcaattgaaaaaattgagaaagaaataaatatgcatcttgataatcttagcggaaggtgggattttgatacagattcaccagagggagggcgaaaaagagcatcatataagaatgcatggttaaaaggtgctggcgaaatagttcaagcgtattatagttatgatgaagtaaaaagtaagcaaatagacactgaaaatatagaaaaggagatagaactagaaaaagaaaatataaataaaattgttaataaaaaggacataattgttgaaaaaagagataaattcttgaaatttaggggaacgatagatcaaatttcgttattaaagaactctattaaagatacaaaaagtaaaatcgagagaatgaaagaggattatgttaaatggccagaatcatgtaaaaagataaatattgcaaaagatttgagtgcgaaactagagcaagtgatggcatatgaattatatgttaatgcgaaagtggcaaatgatagttattgtgaaaaaaagaaactcttagaaaatctaaaggaaattgatgcagaagatataagaagattgagtaatttattatcacagaaacaaatagaagaaaacaaattagccggaattaatattaatgcaaaaataaacaaattaggagaaaatccaattaatatagaatctctggctaacggatcggaaattgccctgaacagtgaagtgataaatataacagaagctataaaagttagtgttccaggagtaatggaaatggaattgtttccaaatggagttaatgttagtgaagtaaatgagtcaataaataaactaaacatagatataaatcaaatatatcaaaaatatgaaatcagcgatattgaaatgcttcgagaaatgtcagatctttatatatccacaaaacaggaagtggaaagattaaaattgaagctagataatgtacttggaaataaaacatgggatgaagtggtcacagcaaataaattagaagttaatgatataaaacctgaaaaggagattagacgagaattgtctgcaatatgtggaaataaaactatagattcatttattggaggtcttgaaacaattgttgaaggatatgaaagtacatatgaaacaatggataggttgaaggaattgatactgagtcgtagtaacgatttggaaaaatatagaagacaaataaattcagttgatgagattcctgatgaatataaatatataaacgatgcagatgagtatgaaacttccattaagctagagatttcggtgctagaaagtcagcttgaaaatcataataacattttgcgagagttagaaataaaattaggtgagaaatctgcggaagaatattcggatgaattacgagaaaggaaagctatacttgattataaaaaaaatgagtataatcattggaaaaatatacaccaaaaatgaaattttaaattccaccaccaccatttggtggtggaatttactcccgcacagtaaaggtttactctttcatataaaaatggtaaggttatctttctttctgacagcagtagaaagaaggatatccatgagtaaatatattccaggaaaccagaagcacctttcccttgaagaccgtatctatatcgaaaac

SEQ ID NO: 662 - DNA, 2089 bp, Agathobacter rectalis
  source 1..2089: mol_type = genomic DNA
tttgagcacaatataatatatcgttttcatatatggttattttttccttttcagcaaaaggtattcccaacaatactatattttttgatttttctgacaatccatctggtataaaatctatctttattcttttttctaccccattttgtaacattatatattgcataactgcagatttacttccgtctatagaatattgaatcggtactccatctaatagcaatacacataaaatggaaatagctttatcgtcaatcatttcattctttatatacatgctagcgcctattgaaaaagtgccaccttgatatactaatggttcattcaaaagtaatccatacttttcctttcctgtttgctcgtcttttacacatttatatatatttgcaatacacgatacctctttttctacacttgcattgctattttgtaccaaattcatttcatcattagtataattattaatattgccacatgatgataaaatagtactcagtaataatatttttataatgcaacgaattctcatattttcacctttttaccattcaaaacacgccatctcacattcacaaacttgcacaattctaatgttttttcgctagtcaactaatcatgctcatacataaaggagaggataacaccattcacttcctttgaaattaagaaaatctgcttatgggttagcataacacatcattttgccttattttcggagattctgaattgctacaccttttttattataataaaaaaggttcaattattattaaatcaaacctttttaattatactaccctattatttataatatattgtcttagtgccttgaccatatgtatcatctttaactttcaagcatgaagaacctctagatgctgaggaaccatatgcagcatccgcactagctgtaatatgatatgtattctgtgcacttacactctttacttgattgtcattagaattgcagaaatgtacgacttttaatgacacactgtcgaacttatacatttcaggttgtgatgcatagcctgttattctatataatattcctccatgtgaagttttaccaatactcattgaccaatatttattagactttcctcctgatgtatataaaccgtcagcatttgcacttatagtttctccaaatatcagtactaaacctagtatcattgctataatcttttttctcattttttctccttaatctaattcttttatagtcatttaataaacgtctcaacccattgatttcacttggtctttgtgattaattttccaaaacatattcaattgtcatactacttgtttgtctttattaaggcatgcccaaaatctgatgttctatgtcaattcaaaaacgcttctgaatactgacattttttctcacatattatgaaatttatccataagaagcaataaatttttttatcaattacctattaattctttttcaattttttggcttaaagatttaggtttttttacttcatacatgaaacctgcacaatttgtacatgacttttttaaagcaaaattaatcatcaaatttcgtattattcttttactataattttcctctgccatattttctcctccctagtataatttcaattatttgtctgttcagaactagtgaaaaaactgatacgtcatgcttgcatgtaaacagcaaattcttgttctcaaggtagctcgaatagagccattccacagatatgatcaaattttacttcgcagtctcgggaaagcacgagcatcgtacagttttacaaatattcactaggcggttctgaatatttatcttaatctaagaattacacaatttattaatttatacaagatatttggcgcaaacgacataaaattggctgtgaatagcttgttactcattgtataaaaaaagagcatctgttataatttacttacactaatcaaggagtagaatatatgtttaacataatttgggaatttataataaatctattagaatcgtttctatttgctgtaatttgtaatgcaaaatttactaaacgtcaatatcattatcatacggctgaacaaacattattcatactatgtaaat

SEQ ID NO: 663 - DNA, 1366 bp, Agathobacter rectalis
  source 1..1366: mol_type = genomic DNA
atacagatttattatcttgtccaattactaaaaaatcaaatgtaaactttttcttatcaatcattttaatcaaattgtatatatatgtttcgacgcctcctagtgtatccgacattccgataactaaaatttttttcataagtatcttttcactccattcgttacaataatcatctgttctttttatacagattatatgaaagttcaaataaagttttatatggcaacggaaacttcaatagttttttcaagtatcctattttccaacctgattttccataacctttaactttttcttttattccttttaatgcatttcttggaataataggtgatatttttccttcattttccatcggaaaagctccaaatacatcaagattttcttttgttggtatatctataatcgattttaatgatgtaaaagcttcatcgaaatctataaaatcaatgctttgaagtaatgagttacaatagtcattaacaaatttaatcgcacctttatgcattttgaaaataacactatcagtatctatactatcacctatttcatattcaaaacacacatcatcgtcactatcattcatttcatatttttttaatgatttctcaggtgctgtaaaaaaagcttctaaaagcgacatcccgcccatgacagtataaaaatagtttgagtattccttgtcaaacaaatacccctttccatgaacatcttcctttgcatgtggatgtatgcctaggtacaatccccagatatctacatttccaaaatgcgataatgcattttgagtcgaacacttccagccaacatcaatgaatgcaacagaaccgttgaaattaatgtttttcaaatattttagcatagctttacgttcttcttccgcacgtgaaaatattaatttttcattttttcttataacgtaatcctgttcaaaaaagctttttatattagattgaaaaacctctgctttagaagatgaaacttcctcaaggcctatcctcttatatatacttgtcacatcagatattgcatcaaatgatgcaatttttagaaataaattgtacctttgattattaaaattaattgccggaacctgaactgctcttctagaaactttaaaataagtactgtcataatcaggatacattatctcaaatgcttctttcaaaacaaaactatcccgagcagcaaaaaaaacttttttgataccttttctttctaattcttcattacaccagttcaaaaaacctacaattaatactccatatatttcatatcctattctttcatatggatcatttagcttttgaattcgattatttataaaattatatgtctttcttttatctactacatacttagtat

SEQ ID NO: 664 - DNA, 777 bp, Agathobacter rectalis
  source 1..777: mol_type = genomic DNA
ggcaaggaacagcttttccttagtgaagaaaaaggtcagtaacgtcttgttggattctctggatgagtgtaccgtatccatttctacaaaagaggataactgcagctcactaaaatcactgaataaccttttctcgaagacggttctgtttgtaatctgtgttttatggcactttcgtggcttgaagccgggcttacgttttaaatcaatgtttctggctgtaaacagaccttgatccagataggtgtacaaggaacggactgacatatccagttctggatgattggtaatgatttgatatggagattgtccctgctcgattaaaggagaaacaatgccatcctttttgcgtaattcatgttttgtcatgtttataccggctctggaaccggaaagcttttcacggtattttctatcagcaaaacgtgcatcgtatctgtatttctgggcgatggtgcaatgatttatcttttttgtgcagccattacagacatagggcgccttatccagtcttttgcactgttccttcacaaaatccttgcaagtttgattacaggtggggcaggaagtgcattttacatcgcagagaatgatttttccgcagacattggttttccggcaatggaagcgatgaatacaaaagttatgggcattatagaaagtacctttgtgataccagtcggatagacggtgagcccttacttctttggaaatggttgttggatccttgcaaagaaagcgggcaatgttcttaaaggtttctcccttgttcagttc

SEQ ID NO: 665 - DNA, 724 bp, Agathobacter rectalis
  source 1..724: mol_type = genomic DNA
tttctcctgaatcgttgtactaaaggcgctgtccggcttatttttgaccgtttagaaaaacgtatgggcacctatgagttcttatctgtctttgaatatatcttgacagacagaggttcagaattcggagatcctgtcgctcttgaaacaggactggatgaaattcagcgtaccagcatctactattgtgatcccatgcgtagcggacaaaaaggaggtcttgagcaggctcacaccatgcttcgcatggtgcttcccaaaggaactagttttgaatttttgacacaatgggatgtgaatctaatcgtgaatcacatcaactccactccaagggaaagtcttaatggaagcacgccttatgacgccgcattagagacactcggaaaagaaaccctaaacgcatttcagcttaagcgcattgaccctgatttggtcaatctaacgcctaagctgattcgcttcaaccattaacaaccacttagaaatctgctgtcggactggaaattaaactttcacattttcctcacatgaccggtggaatttagtctcgcacactaccttccagtggtccgtttgtcataccatcaaatcagttttttccaagaagttactcctattataacagaaataagcgttttgagcttataaaactcttagaaaatcaagaacttttaaatgagtgtggaatttacttctgcactggaatttactttttcaagttagc

SEQ ID NO: 666 - DNA, 193 bp, Agathobacter rectalis
  source 1..193: mol_type = genomic DNA
aaggttgattttaataagaacactgtagcaccaaactcaaatggctggtgggtaatccgcaatggcaaagttgattttaattataatggaattgcctcaaatgcaaatggagactggtactgtcagaatggcaaggtaaactttaatgcttatgacgtattaaatacaccacagggctggtattatttcagag
